(19) United States
(12) Patent Application Publication
(10) Pub. No.: US 2005/0227243 A1
(43) Pub. Date: Oct. 13, 2005

(54) Cell cycle progression proteins

(75) Inventors: Peter Deak, Szeged (HU); Lisa Frenz, Dundee (GB); David Glover, Dundee (GB); Carol Midgley, Dundee (GB)

Correspondence Address: PALMER & DODGE, LLP;KATHLEEN M. WILLIAMS, 111 HUNTINGTON AVENUE, BOSTON, MA, 02199, US

(73) Assignee: Cyclacel Ltd.

(21) Appl. No.: 10/840,060

(22) Filed: May 5, 2004

Related U.S. Application Data
(63) Continuation of application No. PCT/GB02/04780, filed on Oct. 23, 2002.

(30) Foreign Application Priority Data
Nov. 5, 2001 (GB) GB 0126506.5
Nov. 27, 2001 (GB) GB 0128384.5
Feb. 11, 2002 (GB) GB 0203185.4

(51) Int. Cl. C12Q 1/68; G01N 33/574; A61K 39/395; A61K 48/00

(52) U.S. Cl. 435/6; 435/7.23; 514/44; 424/155.1

(57) ABSTRACT

Polynucleotides encoding a number of Drosophila gene products are provided. Polynucleotide probes derived from these nucleotide sequences, polypeptides encoded by the polynucleotides and antibodies that bind to the polypeptides are also provided.

[0001] The present invention relates to a number of genes implicated in the processes of cell cycle progression, including mitosis and meiosis.

[0002] We have now identified a number of genes in the X chromosome of Drosophila, mutations in which disrupt cell cycle progression, for example the processes of mitosis and/or meiosis. We have determined the phenotypes of these mutations and relate the mutations to the total genome sequence and so identify individual genes essential for cell cycle progression.

[0003] According to one aspect of the present invention, we provide a use of a polynucleotide as set out in Table 5, or a polypeptide encoded by the polypeptide, in a method of prevention, treatment or diagnosis of a disease in an individual.

[0004] Preferably, the polynucleotide comprises a human polypeptide as set out in column 3 of Table 5. In preferred embodiments, the polynucleotide or polypeptide is used to identify a substance capable of binding to the polypeptide, which method comprises incubating the polypeptide with a candidate substance under suitable conditions and determining whether the substance binds to the polypeptide.

[0005] Alternatively or in addition, the polynucleotide or polypeptide is used to identify a substance capable of modulating the function of the polypeptide, the method comprising the steps of: incubating the polypeptide with a candidate substance and determining whether activity of the polypeptide is thereby modulated.

[0006] The polynucleotide or polypeptide may be administered to an individual in need of such treatment. Alternatively, or in addition, the substance identified by the method is administered to an individual in need of such treatment.

[0007] The use may be for a method of diagnosis, in which the presence or absence of a polynucleotide is detected in a biological sample in a method comprising: (a) bringing the biological sample containing nucleic acid such as DNA or RNA into contact with a probe comprising a fragment of at least 15 nucleotides of the polynucleotide as set out in Table 5 under hybridising conditions; and (b) detecting any duplex formed between the probe and nucleic acid in the sample.

[0008] Alternatively, or in addition, the presence or absence of a polypeptide is detected in a biological sample in a method comprising: (a) providing an antibody capable of binding to the polypeptide; (b) incubating a biological sample with said antibody under conditions which allow for the formation of an antibody-antigen complex; and (c) determining whether antibody-antigen complex comprising said antibody is formed.

[0009] In highly preferred embodiments, the disease comprises a proliferative disease such as cancer.

[0010] In a further aspect of the invention, we provide a method of modulating, preferably down-regulating, the expression of a polynucleotide as set out in Table 5 in a cell, the method comprising introducing a double stranded RNA (dsRNA) corresponding to the polynucleotide, or an antisense RNA corresponding to the polynucleotide, or a fragment thereof, into the cell.

[0011] According to another aspect of the present invention, we provide a polynucleotide selected from: (a) polynucleotides comprising any one of the nucleotide sequences set out in Example 19, preferably Shp2 polynucleotide, or the complement thereof; (b) polynucleotides comprising a nucleotide sequence capable of hybridising to the nucleotide sequences set out in Example 19, preferably Shp2 polynucleotide, or a fragment thereof; (c) polynucleotides comprising a nucleotide sequence capable of hybridising to the complement of the nucleotide sequences set out in Example 19, preferably Shp2 polynucleotide, or a fragment thereof; (d) polynucleotides comprising a polynucleotide sequence which is degenerate as a result of the genetic code to the polynucleotides defined in (a), (b) or (c).

[0012] There is provided, according to a further aspect of the present invention, a polynucleotide selected from: (a) polynucleotides comprising any one of the nucleotide sequences set out in Example 28, preferably Dlg1 or Dlg2 polynucleotide, or the complement thereof; (b) polynucleotides comprising a nucleotide sequence capable of hybridising to the nucleotide sequences set out in Example 28, preferably Dlg1 or Dlg2 polynucleotide, or a fragment thereof; (c) polynucleotides comprising a nucleotide sequence capable of hybridising to the complement of the nucleotide sequences set out in Example 28, preferably Dlg1 or Dlg2 polynucleotide, or a fragment thereof, (d) polynucleotides comprising a polynucleotide sequence which is degenerate as a result of the genetic code to the polynucleotides defined in (a), (b) or (c).

[0013] We provide, according to another aspect of the present invention, a polynucleotide selected from: (a) polynucleotides comprising any one of the nucleotide sequences set out in Table 5 or the complement thereof, (b) polynucleotides comprising a nucleotide sequence capable of hybridising to the nucleotide sequences set out in Table 5, or a fragment thereof; (c) polynucleotides comprising a nucleotide sequence capable of hybridising to the complement of the nucleotide sequences set out in Table 5, or a fragment thereof; (d) polynucleotides comprising a polynucleotide sequence which is degenerate as a result of the genetic code to the polynucleotides defined in (a), (b) or (c).

[0014] As a further aspect of the present invention, there is provided a polynucleotide selected from: (a) polynucleotides comprising any one of the nucleotide sequences set out in Examples 1 to 18, 20 to 27 and 29 or the complement thereof, (b) polynucleotides comprising a nucleotide sequence capable of hybridising to the nucleotide sequences set out in Examples 1 to 18, 20 to 27 and 29, or a fragment thereof; (c) polynucleotides comprising a nucleotide sequence capable of hybridising to the complement of the nucleotide sequences set out in Examples 1 to 18, 20 to 27 and 29, or a fragment thereof; (d) polynucleotides comprising a polynucleotide sequence which is degenerate as a result of the genetic code to the polynucleotides defined in (a), (b) or (c).

[0015] We provide, according to a further aspect of the present invention, a polynucleotide selected from: (a) polynucleotides comprising any one of the nucleotide sequences set out in Examples 1, 2, 2A, 2B and 2C or the complement thereof; (b) polynucleotides comprising a nucleotide sequence capable of hybridising to the nucleotide sequences set out in Examples 1, 2, 2A, 2B and 2C, or a fragment thereof; (c) polynucleotides comprising a nucleotide sequence capable of hybridising to the complement of the nucleotide sequences set out in Examples 1, 2, 2A, 2B and 2C, or a fragment thereof; (d) polynucleotides comprising a polynucleotide sequence which is degenerate as a result of the genetic code to the polynucleotides defined in (a), (b) or (c).

[0016] The present invention, in another aspect, provides polynucleotide selected from: (a) polynucleotides comprising any one of the nucleotide sequences set out in Examples 3 to 9 and 9A or the complement thereof; (b) polynucleotides comprising a nucleotide sequence capable of hybridising to the nucleotide sequences set out in Examples 3 to 9 and 9A, or a fragment thereof; (c) polynucleotides comprising a nucleotide sequence capable of hybridising to the complement of the nucleotide sequences set out in Examples 3 to 9 and 9A, or a fragment thereof; (d) polynucleotides comprising a polynucleotide sequence which is degenerate as a result of the genetic code to the polynucleotides defined in (a), (b) or (c).

[0017] In a further aspect of the present invention, there is provided polynucleotide selected from: (a) polynucleotides comprising any one of the nucleotide sequences set out in Examples 10 to 29 or the complement thereof; (b) polynucleotides comprising a nucleotide sequence capable of hybridising to the nucleotide sequences set out in Examples 10 to 29, or a fragment thereof; (c) polynucleotides comprising a nucleotide sequence capable of hybridising to the complement of the nucleotide sequences set out in Examples 10 to 29, or a fragment thereof; (d) polynucleotides comprising a polynucleotide sequence which is degenerate as a result of the genetic code to the polynucleotides defined in (a), (b) or (c).

[0018] As a further aspect of the invention, we provide a polynucleotide probe which comprises a fragment of at least 15 nucleotides of a polynucleotide according to any of the above aspects of the invention.

[0019] The present invention also provides a polypeptide which comprises any one of the amino acid sequences set out in Examples 1 to 29 or in any of Examples 1 to 2, 2A, 2B and 2C, Examples 3 to 9 and 9A and Examples 10 to 29, or a homologue, variant, derivative or fragment thereof.

[0020] Preferably the polypeptide is encoded by a cDNA sequence obtainable from a eukaryotic cDNA library, preferably a metazoan cDNA library (such as insect or mammalian) said DNA sequence comprising a DNA sequence being selectively detectable with a nucleotide sequence, preferably a Drosophila nucleotide sequence, as shown in any one of Examples 1 to 29.

[0021] The term “selectively detectable” means that the cDNA used as a probe is used under conditions where a target cDNA is found to hybridize to the probe at a level significantly above background. The background hybridization may occur because of other cDNAs present in the cDNA library. In this event background implies a level of signal generated by interaction between the probe and a non-specific cDNA member of the library which is less than 10 fold, preferably less than 100 fold as intense as the specific interaction observed with the target cDNA. The intensity of interaction may be measured, for example, by radiolabelling the probe, e.g. with ³²P. Suitable conditions may be found by reference to the Examples, as well as in the detailed description below.

[0022] A polynucleotide encoding a polypeptide as described here is also provided.

[0023] We further provide a vector comprising a polynucleotide of the invention, for example an expression vector comprising a polynucleotide of the invention operably linked to a regulatory sequence capable of directing expression of said polynucleotide in a host cell.

[0024] Also provided is an antibody capable of binding such a polypeptide.

[0025] In a further aspect the present invention provides a method for detecting the presence or absence of a polynucleotide of the invention in a biological sample which method comprises: (a) bringing the biological sample containing DNA or RNA into contact with a probe comprising a nucleotide of the invention under hybridising conditions; and (b) detecting any duplex formed between the probe and nucleic acid in the sample.

[0026] In another aspect the invention provides a method for detecting a polypeptide of the invention present in a biological sample which comprises: (a) providing an antibody of the invention; (b) incubating a biological sample with said antibody under conditions which allow for the formation of an antibody-antigen complex; and (c) determining whether antibody-antigen complex comprising said antibody is formed.

[0027] Knowledge of the genes involved in cell cycle progression allows the development of therapeutic agents for the treatment of medical conditions associated with aberrant cell cycle progression. Accordingly, the present invention provides a polynucleotide of the invention for use in therapy. The present invention also provides a polypeptide of the invention for use in therapy. The present invention further provides an antibody of the invention for use in therapy.

[0028] In a specific embodiment, the present invention provides a method of treating a tumor or a patient suffering from a proliferative disease, comprising administering to a patient in need of treatment an effective amount of a polynucleotide, polypeptide and/or antibody of the invention.

[0029] The present invention also provides the use of a polypeptide of the invention in a method of identifying a substance capable of affecting the function of the corresponding gene. For example, in one embodiment the present invention provides the use of a polypeptide of the invention in an assay for identifying a substance capable of inhibiting cell cycle progression. The assay involves contacting the polypeptide with a candidate substance or molecule, and detecting modulation of activity of the polypeptide. In preferred embodiments, further steps of isolating or synthesising the substance so identified are carried out.

[0030] The substance may inhibit any of the steps or stages in the cell cycle, for example, formation of the nuclear envelope, exit from the quiescent phase of the cell cycle (G0), G1 progression, chromosome decondensation, nuclear envelope breakdown, START, initiation of DNA replication, progression of DNA replication, termination of DNA replication, centrosome duplication, G2 progression, activation of mitotic or meiotic functions, chromosome condensation, centrosome separation, microtubule nucleation, spindle formation and function, interactions with microtubule motor proteins, chromatid separation and segregation, inactivation of mitotic functions, formation of contractile ring, and cytokinesis functions. For example, possible functions of genes of the invention for which it may be desired to identify substances which affect such functions include chromatin binding, formation of replication complexes, replication licensing, phosphorylation or other secondary modification activity, proteolytic degradation, microtubule binding, actin binding, septin binding, microtubule organising centre nucleation activity and binding to components of cell cycle signalling pathways.

[0031] In a further aspect the present invention provides a method for identifying a substance capable of binding to a polypeptide of the invention, which method comprises incubating the polypeptide with a candidate substance under suitable conditions and determining whether the substance binds to the polypeptide.

[0032] In an additional aspect, the invention provides kits comprising polynucleotides, polypeptides or antibodies of the invention and methods of using such kits in diagnosing the presence of absence of polynucleotides and polypeptides of the invention including deleterious mutant forms.

[0033] Also provided is a substance identified by the above methods of the invention. Such substances may be used in a method of therapy, such as in a method of affecting cell cycle progression, for example mitosis and/or meiosis.

[0034] The invention also provides a process comprising the steps of: (a) performing one of the above methods; and (b) preparing a quantity of those one or more substances identified as being capable of binding to a polypeptide of the invention.

[0035] Also provided is a process comprising the steps of: (a) performing one of the above methods; and (b) preparing a pharmaceutical composition comprising one or more substances identified as being capable of binding to a polypeptide of the invention.

[0036] We further provide a method for identifying a substance capable of modulating the function of a polypeptide of the invention or a polypeptide encoded by a polynucleotide of the invention, the method comprising the steps of: incubating the polypeptide with a candidate substance and determining whether activity of the polypeptide is thereby modulated.

[0037] A substance identified by a method or assay according to any of the above methods or processes is also provided, as is the use of such a substance in a method of inhibiting the function of a polypeptide. Use of such a substance in a method of regulating a cell division cycle function is also provided.

[0038] We further provide a method of identifying a human nucleic acid sequence, by: (a) selecting a Drosophila polypeptide identified in any of Examples 1 to 29; (b) identifying a corresponding human polypeptide; (c) identifying a nucleic acid encoding the polypeptide of (b).

[0039] Preferably, a human homologue of the Drosophila sequence, or a human sequence similar to the Drosophila sequence, is identified in step (b).

[0040] Preferably, the human polypeptide has at least one of the biological activities, preferably substantially all the biological activities of the Drosophila polypeptide.

[0041] We provide a human polypeptide identified by a method according to the previous aspect of the invention.

### BRIEF DESCRIPTION OF THE FIGURES

[0042] FIG. 1 shows mitotic index after RNAi knockdown of Corkscrew (CG3954) in Dme1-2 Drosophila cultured cells. Values are an average of triplicate samples. Positive controls are siRNA with the mitotic genes Polo kinase and Orbit, negative controls are siRNA with water and with an siRNA against non-endogenous gene GL3

[0043] FIG. 2 shows a BLASTP alignment of Drosophila Corkscrew (CG3954) (query sequence), identified in Example 19 as a cell cycle gene, and human Shp2 Protein-tyrosine phosphatase, non-receptor type 11 (genbank accession D13540 ) (subject sequence).

[0044] FIG. 3 shows a histogram of Facs analysis of cell cycle compartment as determined by DNA content in U20S cells after human Shp2 siRNA transfection for 48 hours. The negative control is transfection with siRNA against the non-endogenous gene GL3.

[0045] FIG. 4 shows fluorescence micrographs showing the effect of Shp2 siRNAi in U2OS cells. A) Irregular nuclear shape, B) Increase in apoptosis.

[0046] FIG. 5 shows Mitotic index after RNAi knockdown of Drosophila discs large 1 Dlg1 (CG1725) in Dme1-2 Drosophila cultured cells. Values are an average of triplicate samples. Positive controls are siRNA with the mitotic genes Polo kinase and Orbit, negative controls are siRNA with water and with an siRNA against non-endogenous gene GL3

[0047] FIG. 6A shows a BLASTP alignment of Drosophila discs large 1 Dlg1 (CG1725), identified in Example 28 as a cell cycle gene, and human discs, large (Drosophila) homolog 1 (genbank accession U13896).

[0048] FIG. 6B shows a ClustalW alignment of Drosophila discs large 1 Dlg1 (CG1725) and human discs, large (Drosophila) homolog 1 (genbank accession U13896).

[0049] FIG. 6C shows a BLASTP alignment of Drosophila discs large 1 Dlg1 (CG1725), and human discs, large (drosophila) homolog 2 (genbank accession U32376).

[0050] FIG. 6D shows a ClustalW alignment of Drosophila discs large 1 Dlg1 (CG1725) and human discs, large (drosophila) homolog 2 (genbank accession U32376).

[0051] FIG. 7 shows a ClustalW alignment Drosophila Dlg1 and 5 human Dlg genes (Dlg 1-5) so far described.

[0052] FIG. 8 shows a histogram of FACS analysis of cell cycle status after siRNA in U20S cells. Negative control is siRNA against the non-endogenous GL3 gene.

[0053] FIG. 9 fluorescence micrographs showing the dominant phenotype observed with Dlg1 COD1654 siRNAi in U20S cells. A) Multicentrosomal cells at prometaphase and anaphase. B) Cytokinesis defect

[0054] FIG. 10 fluorescence micrographs showing the dominant phenotype observed with Dlg2 COD1652 siRNAi in U20S cells. A) Multicentrosomal cell at telophase. B) Cytokinesis defects.

### DETAILED DESCRIPTION

[0055] We provide for polynucleotide sand polypeptides whose sequences are set out, or which are referred to, in any of Examples 1 to 29, including Drosophila and human sequences. In particular, we provide for the sequences, including human sequences, and their use in diagnosis and treatment of disease (including prevention and treatment of diseases, syndromes and symptoms) as described in further detail below. A particularly suitable disease for treatment or diagnosis is a proliferative disease such as cancer or any tumor. The polynucleotides and polypeptides disclosed here may be used in screening assays to identify compounds which are capable of binding to, or inhibiting an activity of, the polypeptide or polynucleotide.

[0056] Particularly preferred polypeptides include those set out in Example 19 and referred to as Shp2, as well as those set out in Example 28 and referred to as Dlg1 and Dlg2. Accordingly, we provide for Shp2 polypeptide and polynucleotide, as well as Dlg1 and Dlg2 polypeptide and polynucleotide, for the treatment and diagnosis of diseases such as cancer, as described in further detail below.

[0057] By the term “Shp2”, we mean a sequence as set out in Example 19 and having the accession number NM_{—}002834, together with its variants, homologues, derivatives, fragments and complements as described in further detail below. Preferably, the term “Shp2” should be taken to refer to the human sequence itself. Two transcript variants (variants 1 and 2 as set out in Example 19) are known, and both are encompassed in the term “Shp2”. Shp2 is also known as Homo sapiens protein tyrosine phosphatase, non-receptor type 11 (PTPN11). Furthermore, various sequences differing in length are known for Shp2, and each of these is intended to be included for the uses and compositions described here.

[0058] As used in this document, the terms “Dlg1” and “Dlg2” mean the sequences as set out in Example 28 and having the GENBANK accession numbers U13896 and U32376 respectively. Variants, homologues, derivatives, fragments and complements (as described in further detail below) of each of these sequences are also included within the meaning of these terms.

[0059] Dlg1 is also known as “human discs, large (Drosophila) homolog 1” while Dlg2 is also known as “human discs, large (Drosophila) homolog 2, chapsyn-110 channel-associated protein of synapses-110′”. Various sequences differing in length are known for Dlg1 and Dlg2, and each of these is intended to be included for the uses and compositions described here.

[0060] Preferably, the polypeptides and polynucleotides are such that they give rise to or are associated with defined phenotypes when mutated.

[0061] For example, mutations in the polypeptides and polynucleotides may be associated with female sterility; such polypeptides and polynucleotides are conveniently categorised as “Category 1”. Phenotypes associated with Category 1 polypeptides and polynucleotides include any one or more of the following, singly or in combination: Female semi-sterile, brown eggs laid; female sterile, few eggs laid, several fully matured eggs in ovarioles; female semi-sterile, lays eggs, but arrest before cortical migration; “Female sterile, no eggs laid. Fully mature eggs, but “retained eggs” phenotype. Also has a mitotic phenotype: higher mitotic index, uneven chromosome staining, tangled and badly defined chromosomes with frequent bridges”; Female sterile (semi-sterile), 2-3 fully matured eggs in each of the ovarioles.

[0062] Alternatively, mutations in the polypeptides and polynucleotides may be associated with male sterility; such polypeptides and polynucleotides are conveniently categorised as “Category 2”. Phenotypes associated with Category 2 polypeptides and polynucleotides include any one or more of the following, singly or in combination: Lethal phase pharate adult, cytokinesis defect—some onion stage cysts with large nebenkerns; reduced adult viability, cytokinesis defect—onion stage cysts have variable sized Nebenkerns—mitotic phenotype: tangled unevenly condensed chromosomes, anaphases with lagging chromosomes and bridges; semi-lethal male and female, cytokinesis defect—in some cysts, variable sized Nebenkerns; male sterile, cytokinesis defect, different meiotic stages within one cyst, variable sized nuclei, 2-4 nuclei, mitotic phenotype: semi-lethal, rod-like overcondensed chromosomes, high mitotic index, lagging chromosomes and bridges; male sterile, asynchronous meiotic divisions, cysts with large Nebenkern and 1-2 larger nuclei, testis from 2-3 old males become smaller, high mitotic index, colchicine type overcondensaton, many anaphases and telophases, no decondensation in telophase, mitotic phenotype: high mitotic index, colchicines-type overcondensed chromosomes, many ana- and relophases, no decondensation in telophase; cytokinesis defect, small testis, no meiosis observed, variable sized Nebenkerns with 2-4N nuclei; male sterile, cytokinesis defect, larger Nebenkerns with 2-4N nuclei; Male sterile, Cytokinesis defect: variable sized Nebenkerns with 4N nuclei, some nuclei detached from Nebenkern.

[0063] Mutations in the polypeptides and polynucleotides may be associated with a mitotic (neuroblast) phenotype (“Category 3”). Phenotypes associated with Category 3 polypeptides and polynucleotides include any one or more of the following, singly or in combination: lethal phase between pupil and pharate adult (P-pA), high mitotic index, rod-like overcondensed chromosomes, a few circular metaphases, many overcondensed anaphases and telophases, a few tetraploid cells; lethal phase pharate adult, high mitotic index, rod-like overcondensed chromosomes, lagging chromosomes and bridges in anaphase, highly condensed; lethal phase pupal—pharate adult, high mitotic index, colchicines-type overcondensation, high frequency of polyploids; lethal phase pupal—pharate adult, high mitotic index, colchicines-type overcondensed chromosomes, many strongly stained nuclei; lethal phase larval stage 3-pre-pupal-pupal, small optic lobes, missing or small imaginal discs, badly defined chromosomes; lethal phase pharate adult, Dot and rod-like overcondensed chromosomes, high mitotic index, overcondensed anaphases some with lagging chromosomes, a few tetraploid cells with overcondensed chromosomes, XYY males; lethal phase embryonic larval phase3-pre-pupal-pupal, high mitotic index, dot-like chromosomes, strong metaphase arrest; lethal phase larval phase 3D pre-pupal-pupal-pharate adult-adult, high mitotic index, dot and rod-like overcondensed chromosomes, high frequency of polyploids; lethal phase larval stage 3 (few pupae), high mitotic index, colchicine-type overcondensation of chromosomes, polyploid cells, mininuclei formation; lethal phase larval stage 1-2, low mitotic index, few cells in mitosis, metaphase with separated chromosomes; viable, high mitotic index, colchicines-type overcondensed chromosomes, a few polyploid cells; lethal phase pharate adult, high mitotic index, rod like overcondensed chromosomes, few anaphases with lagging chromosomes; lethal phase larval stage 3-pharate adult, small brain and optic lobes, high mitotic index, rod-like overcondensed chromosomes, fewer ana- and telophases, overcondensed chromosomes in ana- and telophase; lethal phase larval stage 3, small brain, few cells in mitosis, badly defined chromosomes, weak chromosome condensation, abnormal anaphases with broken chromosomes; lethal phase larval stage 3, small brain, high mitotic index, rod-like overcondensed chromosomes, fewer ana- and telophases; semilethal male and female, Low mitotic index, badly defined chromosomes, weak/uneven staining, fewer ana- and telophases; lethal phase pupal to pharate adult, lagging chromosomes and bridges in ana- and telophase; lethal phase, pupal, uneven chromosome condensation, lagging chromosomes in anaphase; lethal phase pupal, higher mitotic index, colchicine-like overcondensed chromosomes, many ana- and telophases, lagging chromosomes; lethal phase, prepupal—pupal, high mitotic index, colchicines-like chromosome condensation, metaphase arrest.

[0064] The polypeptides and polynucleotides described here may also be categorised according to their function, or their putative function.

[0065] For example, the polypeptides described here preferably comprise, and the polynucleotides described here are ones which preferably encode polypeptides comprising, any one or more of the following: CREB-binding proteins, transcription factors, casein kinases, serine threonine kinases, preferably involved in replication and cell cycle, protein phosphatases, membrane associated proteins, preferably involved in priming synaptic vesicles, dynein light chains, microtubule motor proteins, protein phosphatases, protein phosphatases with p53 dependent expression, proteins capable of inhibiting cell division, ribosomal proteins, motor proteins, cytoskeletal binding proteins linking to plama membrane, proteins involved in cytokinesis and cell shape, phosphatidylinositol 3-kinases, C-myc oncogenes, transcription factors, dehydrogenases, thioredoxin reductases, cell cycle regulators preferably involved in cyclin degradation; centrosome components, protein tyrosine phosphatases, Wnt oncogenes, ubiquitin ligases, ubiquitin conjugating enzymes, vesicle trafficking proteins, protein kinases (including protein kinases which regulate the G1/S phase transition and/or DNA replication in mammalian cells), serine/threonine kinases, including serine/threonine kinases involved in winglwess signaling pathway, components of cell junctions, including components of cell junctions having a role in proliferation and Ras associated effector proteins; hydroxymethyltransferase; glycosylation/membrane protein; hydrogen transporting ATP synthase; role in cell cycle progression.

[0066] The practice of the present invention will employ, unless otherwise indicated, conventional techniques of chemistry, molecular biology, microbiology, recombinant DNA and immunology, which are within the capabilities of a person of ordinary skill in the art. Such techniques are explained in the literature. See, for example, J. Sambrook, E. F. Fritsch, and T. Maniatis, 1989, Molecular Cloning: A Laboratory Manual, Second Edition, Books 1-3, Cold Spring Harbor Laboratory Press; Ausubel, F. M. et al. (1995 and periodic supplements; Current Protocols in Molecular Biology, ch. 9, 13, and 16, John Wiley & Sons, New York, N.Y.); B. Roe, J. Crabtree, and A. Kahn, 1996, DNA Isolation and Sequencing: Essential Techniques, John Wiley & Sons; J. M. Polak and James O'D. McGee, 1990, In Situ Hybridization: Principles and Practice; Oxford University Press; M. J. Gait (Editor), 1984, Oligonucleotide Synthesis: A Practical Approach, Irl Press; D. M. J. Lilley and J. E. Dahlberg, 1992, Methods of Enzymology: DNA Structure Part A: Synthesis and Physical Analysis of DNA Methods in Enzymology, Academic Press; Using Antibodies: A Laboratory Manual: Portable Protocol NO. I by Edward Harlow, David Lane, Ed Harlow (1999, Cold Spring Harbor Laboratory Press, ISBN 0-87969-544-7); Antibodies: A Laboratory Manual by Ed Harlow (Editor), David Lane (Editor) (1988, Cold Spring Harbor Laboratory Press, ISBN 0-87969-314-2), 1855. Handbook of Drug Screening, edited by Ramakrishna Seethala, Prabhavathi B. Fernandes (2001, New York, N.Y., Marcel Dekker, ISBN 0-8247-0562-9); and Lab Ref: A Handbook of Recipes, Reagents, and Other Reference Tools for Use at the Bench, Edited Jane Roskams and Linda Rodgers, 2002, Cold Spring Harbor Laboratory, ISBN 0-87969-630-3. Each of these general texts is herein incorporated by reference.

Polypeptides

[0067] It will be understood that polypeptides as described here are not limited to polypeptides having the amino acid sequence set out in Examples 1 to 29 or fragments thereof but also include homologous sequences obtained from any source, for example related viral/bacterial proteins, cellular homologues and synthetic peptides, as well as variants or derivatives thereof.

[0068] Thus polypeptides also include those encoding homologues from other species including animals such as mammals (e.g. mice, rats or rabbits), especially primates, more especially humans. More specifically, such homologues include human homologues.

[0069] Thus, we describe variants, homologues or derivatives of the amino acid sequence set out in Examples 1 to 29, as well as variants, homologues or derivatives of the nucleotide sequence coding for the amino acid sequences as described here.

[0070] In the context of this document, a homologous sequence is taken to include an amino acid sequence which is at least 15, 20, 25, 30, 40, 50, 60, 70, 80 or 90% identical, preferably at least 95 or 98% identical at the amino acid level over at least 50 or 100, preferably 200, 300, 400 or 500 amino acids with any one of the polypeptide sequences shown in the Examples. In particular, homology should typically be considered with respect to those regions of the sequence known to be essential for protein function rather than non-essential neighbouring sequences. This is especially important when considering homologous sequences from distantly related organisms.

[0071] Although homology can also be considered in terms of similarity (i.e. amino acid residues having similar chemical properties/functions), in the context of this document, it is preferred to express homology in terms of sequence identity.

[0072] Homology comparisons can be conducted by eye, or more usually, with the aid of readily available sequence comparison programs. These publicly and commercially available computer programs can calculate % homology between two or more sequences.

[0073] % homology may be calculated over contiguous sequences, i.e. one sequence is aligned with the other sequence and each amino acid in one sequence directly compared with the corresponding amino acid in the other sequence, one residue at a time. This is called an “ungapped” alignment. Typically, such ungapped alignments are performed only over a relatively short number of residues (for example less than 50 contiguous amino acids).

[0074] Although this is a very simple and consistent method, it fails to take into consideration that, for example, in an otherwise identical pair of sequences, one insertion or deletion will cause the following amino acid residues to be put out of alignment, thus potentially resulting in a large reduction in % homology when a global alignment is performed. Consequently, most sequence comparison methods are designed to produce optimal alignments that take into consideration possible insertions and deletions without penalising unduly the overall homology score. This is achieved by inserting “gaps” in the sequence alignment to try to maximise local homology.

[0075] However, these more complex methods assign “gap penalties” to each gap that occurs in the alignment so that, for the same number of identical amino acids, a sequence alignment with as few gaps as possible—reflecting higher relatedness between the two compared sequences—will achieve a higher score than one with many gaps. “Affine gap costs” are typically used that charge a relatively high cost for the existence of a gap and a smaller penalty for each subsequent residue in the gap. This is the most commonly used gap scoring system. High gap penalties will of course produce optimised alignments with fewer gaps. Most alignment programs allow the gap penalties to be modified. However, it is preferred to use the default values when using such software for sequence comparisons. For example when using the GCG Wisconsin Bestfit package (see below) the default gap penalty for amino acid sequences is −12 for a gap and −4 for each extension.

[0076] Calculation of maximum % homology therefore firstly requires the production of an optimal alignment, taking into consideration gap penalties. A suitable computer program for carrying out such an alignment is the GCG Wisconsin Bestfit package (University of Wisconsin, U.S.A; Devereux et aL, 1984, Nucleic Acids Research 12:387). Examples of other software than can perform sequence comparisons include, but are not limited to, the BLAST package (see Ausubel et al., 1999 ibid—Chapter 18), FASTA (Atschul et al., 1990, J. Mol. Biol., 403-410) and the GENEWORKS suite of comparison tools. Both BLAST and FASTA are available for offline and online searching (see Ausubel et al., 1999 ibid, pages 7-58 to 7-60). However it is preferred to use the GCG Bestfit program.

[0077] Although the final % homology can be measured in terms of identity, the alignment process itself is typically not based on an all-or-nothing pair comparison. Instead, a scaled similarity score matrix is generally used that assigns scores to each pairwise comparison based on chemical similarity or evolutionary distance. An example of such a matrix commonly used is the BLOSUM62 matrix—the default matrix for the BLAST suite of programs. GCG Wisconsin programs generally use either the public default values or a custom symbol comparison table if supplied (see user manual for further details). It is preferred to use the public default values for the GCG package, or in the case of other software, the default matrix, such as BLOSUM62.

[0078] Once the software has produced an optimal alignment, it is possible to calculate % homology, preferably % sequence identity. The software typically does this as part of the sequence comparison and generates a numerical result.

[0079] The terms “variant” or “derivative” in relation to the amino acid sequences includes any substitution of, variation of, modification of, replacement of, deletion of or addition of one (or more) amino acids from or to the sequence providing the resultant amino acid sequence retains substantially the same activity as the unmodified sequence, preferably having at least the same activity as the polypeptides presented in the sequence listings in the Examples.

[0080] Polypeptides having the amino acid sequence shown in the Examples, or fragments or homologues thereof may be modified for use in the methods and compositions described here. Typically, modifications are made that maintain the biological activity of the sequence. Amino acid substitutions may be made, for example from 1, 2 or 3 to 10, 20 or 30 substitutions provided that the modified sequence retains the biological activity of the unmodified sequence. Alternatively, modifications may be made to deliberately inactivate one or more functional domains of the polypeptides described here. Amino acid substitutions may include the use of non-naturally occurring analogues, for example to increase blood plasma half-life of a therapeutically administered polypeptide.

[0081] Conservative substitutions may be made, for example according to the Table below. Amino acids in the same block in the second column and preferably in the same line in the third column may be substituted for each other:

| | | |
|---|---|---|
| ALIPHATIC | Non-polar | G A P |
| | | I L V |
| | Polar - uncharged | C S T M |
| | | N Q |
| | Polar - charged | D E |
| | | K R |
| AROMATIC | | H F W Y |

[0082] Polypeptides also include fragments of the full length sequences mentioned above. Preferably said fragments comprise at least one epitope. Methods of identifying epitopes are well known in the art. Fragments will typically comprise at least 6 amino acids, more preferably at least 10, 20, 30, 50 or 100 amino acids.

[0083] Proteins as described here are typically made by recombinant means, for example as described below. However they may also be made by synthetic means using techniques well known to skilled persons such as solid phase synthesis. Proteins may also be produced as fusion proteins, for example to aid in extraction and purification. Examples of fusion protein partners include glutathione-S-transferase (GST), 6×His, GAL4 (DNA binding and/or transcriptional activation domains) and β-galactosidase. It may also be convenient to include a proteolytic cleavage site between the fusion protein partner and the protein sequence of interest to allow removal of fusion protein sequences. Preferably the fusion protein will not hinder the function of the protein of interest sequence. Proteins as described here may also be obtained by purification of cell extracts from animal cells.

[0084] The proteins may be in a substantially isolated form. It will be understood that the protein may be mixed with carriers or diluents which will not interfere with the intended purpose of the protein and still be regarded as substantially isolated. A protein may also be in a substantially purified form, in which case it will generally comprise the protein in a preparation in which more than 90%, e.g. 95%, 98% or 99% of the protein in the preparation is a protein as described in this document.

[0085] A polypeptide may be labeled with a revealing label. The revealing label may be any suitable label which allows the polypeptide to be detected. Suitable labels include radioisotopes, e.g. ¹²⁵I, enzymes, antibodies, polynucleotides and linkers such as biotin. Labeled polypeptides as described here may be used in diagnostic procedures such as immunoassays to determine the amount of a polypeptide in a sample. Polypeptides or labeled polypeptides may also be used in serological or cell-mediated immune assays for the detection of immune reactivity to said polypeptides in animals and humans using standard protocols.

[0086] A polypeptide or labeled polypeptide or fragment thereof may also be fixed to a solid phase, for example the surface of an immunoassay well or dipstick. Such labeled and/or immobilised polypeptides may be packaged into kits in a suitable container along with suitable reagents, controls, instructions and the like. Such polypeptides and kits may be used in methods of detection of antibodies to the polypeptides or their allelic or species variants by immunoassay.

[0087] Immunoassay methods are well known in the art and will generally comprise: (a) providing a polypeptide comprising an epitope bindable by an antibody against said protein; (b) incubating a biological sample with said polypeptide under conditions which allow for the formation of an antibody-antigen complex; and (c) determining whether antibody-antigen complex comprising said polypeptide is formed.

[0088] The polypeptides described here may be used in in vitro or in vivo cell culture systems to study the role of their corresponding genes and homologues thereof in cell function, including their function in disease. For example, truncated or modified polypeptides may be introduced into a cell to disrupt the normal functions which occur in the cell. The polypeptides may be introduced into the cell by in situ expression of the polypeptide from a recombinant expression vector (see below). The expression vector optionally carries an inducible promoter to control the expression of the polypeptide.

[0089] The use of appropriate host cells, such as insect cells or mammalian cells, is expected to provide for such post-translational modifications (e.g. myristolation, glycosylation, truncation, lapidation and tyrosine, serine or threonine phosphorylation) as may be needed to confer optimal biological activity on recombinant expression products. Such cell culture systems in which such polypeptides are expressed may be used in assay systems to identify candidate substances which interfere with or enhance the functions of the polypeptides described here in the cell.

Polynucleotides

[0090] We demonstrate here that mutations in genes encoding the polypeptides disclosed in the Examples demonstrate a cell cycle defect, and that. accordingly these genes and the proteins encoded by them are responsible for cell cycle function.

[0091] Polynucleotides as described in this document include polynucleotides that comprise any one or more of the nucleic acid sequences encoding the polypeptides set out in Examples 1 to 29 and fragments thereof. Such polynucleotides also include polynucleotides encoding the polypeptides described here. It is straightforward to identify a nucleic acid sequence which encodes such a polypeptide, by reference to the genetic code. Furthermore, computer programs are available which translate a nucleic acid sequence to a polypeptide sequence, and/or vice versa. Each and all of sequences which are capable of encoding the polypeptides disclosed in the Examples is considered disclosed in this document, and the disclosure of a polypeptide sequence includes a disclosure of all nucleic acids (and their sequences) which encodes that polypeptide sequence.

[0092] It will be understood by a skilled person that numerous different polynucleotides can encode the same polypeptide as a result of the degeneracy of the genetic code. In addition, it is to be understood that skilled persons may, using routine techniques, make nucleotide substitutions that do not affect the polypeptide sequence encoded by the polynucleotides described here to reflect the codon usage of any particular host organism in which the polypeptides are to be expressed.

[0093] In preferred embodiments, the polynucleotides comprise those polypeptides, such as cDNA, MRNA, and genomic DNA of the relevant organism, which encode the polypeptides disclosed in the Examples. Such polynucleotides may typically comprise Drosophila cDNA, MRNA, and genomic DNA, Homo sapiens cDNA, MRNA, and genomic DNA, etc. Accession numbers are provided in the Examples for the polypeptide sequences, and it is straightforward to derive the encoding nucleic acid sequences by use of such accession numbers in a relevant database, such as a Drosophila sequence database, a human sequence database, including a Human Genome Sequence database, GadFly, FlyBase, etc. in particular, the annotated Drosophila sequence database of the Berkeley Drosophila Genome Project (GadFly: Genome Annotation Database of Drosophil at http://www.fruitfly.org/annot/) may be used to identify such Drosophila and human polynucleotide sequences. Relevant sequences may also be obtained by searching sequence databases such as BLAST with the polypeptide sequences. In particular, a search using TBLASTN may be employed.

[0094] Furthermore, we provide a method of identifying a human nucleic acid sequence, by: (a) selecting a Drosophila polypeptide identified in any of Examples 1 to 29; (b) identifying a corresponding human polypeptide; (c) identifying a nucleic acid encoding the polypeptide of (b). Step (b) may in particular involve identifying a human homologue of the Drosophila sequence, or a human sequence similar to the Drosophila sequence. Preferably, such a polypeptide has at least one of the biological activities, preferably substantially all the biological activities (such as identified in the Examples) of the Drosophila polypeptide. Preferably, the human polypeptide is involved in an aspect of cell cycle control. A human polypeptide identified as above, as well as a sequence of the human polypeptide and a sequence of the human nucleic acid are also provided.

[0095] Polynucleotides as described here may comprise DNA or RNA. They may be single-stranded or double-stranded. They may also be polynucleotides which include within them synthetic or modified nucleotides. A number of different types of modification to oligonucleotides are known in the art. These include methylphosphonate and phosphorothioate backbones, addition of acridine or polylysine chains at the 3′ and/or 5′ ends of the molecule. For the purposes of this document, it is to be understood that the polynucleotides described herein may be modified by any method available in the art. Such modifications may be carried out in order to enhance the in vivo activity or life span of polynucleotides.

[0096] The terms “variant”, “homologue” or “derivative” in relation to a nucleotide sequence include any substitution of, variation of, modification of, replacement of, deletion of or addition of one (or more) nucleic acid from or to the sequence. Preferably said variant, homologues or derivatives code for a polypeptide having biological activity.

[0097] As indicated above, with respect to sequence homology, preferably there is at least 50 or 75%, more preferably at least 85%, more preferably at least 90% homology to the sequences shown in the sequence listing herein. More preferably there is at least 95%, more preferably at least 98%, homology. Nucleotide homology comparisons may be conducted as described above. A preferred sequence comparison program is the GCG Wisconsin Bestfit program described above. The default scoring matrix has a match value of 10 for each identical nucleotide and −9 for each mismatch. The default gap creation penalty is −50 and the default gap extension penalty is −3 for each nucleotide.

[0098] This document also encompasses nucleotide sequences that are capable of hybridising selectively to the sequences presented herein, or any variant, fragment or derivative thereof, or to the complement of any of the above. Nucleotide sequences are preferably at least 15 nucleotides in length, more preferably at least 20, 30, 40 or 50 nucleotides in length.

[0099] The term “hybridization” as used herein shall include “the process by which a strand of nucleic acid joins with a complementary strand through base pairing” as well as the process of amplification as carried out in polymerase chain reaction technologies.

[0100] Polynucleotides which capable of selectively hybridising to the nucleotide sequences presented herein, or to their complement, will be generally at least 70%, preferably at least 80 or 90% and more preferably at least 95% or 98% homologous to the corresponding nucleotide sequences presented herein over a region of at least 20, preferably at least 25 or 30, for instance at least 40, 60 or 100 or more contiguous nucleotides.

[0101] The term “selectively hybridizable” means that the polynucleotide used as a probe is used under conditions where a target polynucleotide is found to hybridize to the probe at a level significantly above background. The background hybridization may occur because of other polynucleotides present, for example, in the cDNA or genomic DNA library being screening. In this event, background implies a level of signal generated by interaction between the probe and a non-specific DNA member of the library which is less than 10 fold, preferably less than 100 fold as intense as the specific interaction observed with the target DNA. The intensity of interaction may be measured, for example, by radiolabelling the probe, e.g. with ³²P.

[0102] Hybridization conditions are based on the melting temperature (Tm) of the nucleic acid binding complex, as taught in Berger and Kimmel (1987, Guide to Molecular Cloning Techniques, Methods in Enzymology, Vol 152, Academic Press, San Diego Calif.), and confer a defined 37 stringency” as explained below.

[0103] Maximum stringency typically occurs at about Tm−5° C. (5° C. below the Tm of the probe); high stringency at about 5° C. to 10° C. below Tm; intermediate stringency at about 10° C. to 20° C. below Tm; and low stringency at about 20° C. to 25° C. below Tm. As will be understood by those of skill in the art, a maximum stringency hybridization can be used to identify or detect identical polynucleotide sequences while an intermediate (or low) stringency hybridization can be used to identify or detect similar or related polynucleotide sequences.

[0104] In a preferred aspect, we describe nucleotide sequences that can hybridise to the nucleotide sequence as described here under stringent conditions (e.g. 65° C. and 0.1×SSC {1×SSC=0.15 M NaCl, 0.015 M Na₃ Citrate pH 7.0).

[0105] Where the polynucleotide is double-stranded, both strands of the duplex, either individually or in combination, are encompassed by the methods and compositions described here. Where the polynucleotide is single-stranded, it is to be understood that the complementary sequence of that polynucleotide is also included.

[0106] Polynucleotides which are not 100% homologous to the sequences of described here but are encompassed can be obtained in a number of ways. Other variants of the sequences described herein may be obtained for example by probing DNA libraries made from a range of individuals, for example individuals from different populations. In addition, other viral/bacterial, or cellular homologues particularly cellular homologues found in mammalian cells (e.g. rat, mouse, bovine and primate cells), may be obtained and such homologues and fragments thereof in general will be capable of selectively hybridising to sequences which encode the polypeptides shown in the Examples. Such sequences may be obtained by probing cDNA libraries made from or genomic DNA libraries from other animal species, and probing such libraries with probes comprising all or part of any on of the sequences under conditions of medium to high stringency. The nucleotide sequences of or which encode the human homologues described in the Examples, may preferably be used to identify other primate/mammalian homologues since nucleotide homology between human sequences and mammalian sequences is likely to be higher than is the case for the Drosophila sequences identified herein.

[0107] Similar considerations apply to obtaining species homologues and allelic variants of the polypeptide or nucleotide sequences described here.

[0108] Variants and strain/species homologues may also be obtained using degenerate PCR which will use primers designed to target sequences within the variants and homologues encoding conserved amino acid sequences within the sequences described here. Conserved sequences can be predicted, for example, by aligning the amino acid sequences from several variants/homologues. Sequence alignments can be performed using computer software known in the art. For example the GCG Wisconsin PileUp program is widely used.

[0109] The primers used in degenerate PCR will contain one or more degenerate positions and will be used at stringency conditions lower than those used for cloning sequences with single sequence primers against known sequences. It will be appreciated by the skilled person that overall nucleotide homology between sequences from distantly related organisms is likely to be very low and thus in these situations degenerate PCR may be the method of choice rather than screening libraries with labeled fragments.

[0110] In addition, homologous sequences may be identified by searching nucleotide and/or protein databases using search algorithms such as the BLAST suite of programs. This approach is described below and in the Examples.

[0111] Alternatively, such polynucleotides may be obtained by site directed mutagenesis of characterised sequences, such as the sequences encoding polypeptides disclosed in the Examples. This may be useful where for example silent codon changes are required to sequences to optimise codon preferences for a particular host cell in which the polynucleotide sequences are being expressed. Other sequence changes may be desired in order to introduce restriction enzyme recognition sites, or to alter the property or function of the polypeptides encoded by the polynucleotides. For example, further changes may be desirable to represent particular coding changes found in the sequences coding polypeptides disclosed in the Examples which give rise to mutant genes which have lost their regulatory function. Probes based on such changes can be used as diagnostic probes to detect such mutants.

[0112] The polynucleotides described here may be used to produce a primer, e.g. a PCR primer, a primer for an alternative amplification reaction, a probe e.g. labeled with a revealing label by conventional means using radioactive or non-radioactive labels, or the polynucleotides may be cloned into vectors. Such primers, probes and other fragments will be at least 8, 9, 10, or 15, preferably at least 20, for example at least 25, 30 or 40 nucleotides in length, and are also encompassed by the term “polynucleotides” as used herein.

[0113] Polynucleotides such as a DNA polynucleotides and probes as described here may be produced recombinantly, synthetically, or by any means available to those of skill in the art. They may also be cloned by standard techniques.

[0114] In general, primers will be produced by synthetic means, involving a step wise manufacture of the desired nucleic acid sequence one nucleotide at a time. Techniques for accomplishing this using automated techniques are readily available in the art.

[0115] Longer polynucleotides will generally be produced using recombinant means, for example using a PCR (polymerase chain reaction) cloning techniques. This will involve making a pair of primers (e.g. of about 15 to 30 nucleotides) flanking a region of the lipid targeting sequence which it is desired to clone, bringing the primers into contact with mRNA or cDNA obtained from an animal or human cell, performing a polymerase chain reaction under conditions which bring about amplification of the desired region, isolating the amplified fragment (e.g. by purifying the reaction mixture on an agarose gel) and recovering the amplified DNA. The primers may be designed to contain suitable restriction enzyme recognition sites so that the amplified DNA can be cloned into a suitable cloning vector

[0116] The polynucleotides or primers may carry a revealing label. Suitable labels include radioisotopes such as ³²P or ³⁵S, enzyme labels, or other protein labels such as biotin. Such labels may be added to the polynucleotides or primers and may be detected using by techniques known per se.

[0117] Polynucleotides or primers or fragments thereof labeled or unlabeled may be used by a person skilled in the art in nucleic acid-based tests for detecting or sequencing polynucleotides in the human or animal body.

[0118] Such tests for detecting generally comprise bringing a biological sample containing DNA or RNA into contact with a probe comprising a polynucleotide or primer as described here under hybridising conditions and detecting any duplex formed between the probe and nucleic acid in the sample. Such detection may be achieved using techniques such as PCR or by immobilising the probe on a solid support, removing nucleic acid in the sample which is not hybridised to the probe, and then detecting nucleic acid which has hybridised to the probe. Alternatively, the sample nucleic acid may be immobilised on a solid support, and the amount of probe bound to such a support can be detected. Suitable assay methods of this and other formats can be found in for example WO89/03891 and WO90/13667.

[0119] Tests for sequencing nucleotides include bringing a biological sample containing target DNA or RNA into contact with a probe comprising a polynucleotide or primer under hybridising conditions and determining the sequence by, for example the Sanger dideoxy chain termination method (see Sambrook et al.).

[0120] Such a method generally comprises elongating, in the presence of suitable reagents, the primer by synthesis of a strand complementary to the target DNA or RNA and selectively terminating the elongation reaction at one or more of an A, C, G or TIU residue; allowing strand elongation and termination reaction to occur; separating out according to size the elongated products to determine the sequence of the nucleotides at which selective termination has occurred. Suitable reagents include a DNA polymerase enzyme, the deoxynucleotides dATP, dCTP, dGTP and dTTP, a buffer and ATP. Dideoxynucleotides are used for selective termination.

[0121] Tests for detecting or sequencing nucleotides in a biological sample may be used to determine particular sequences within cells in individuals who have, or are suspected to have, an altered gene sequence, for example within cancer cells including leukaemia cells and solid tumours such as breast, ovary, lung, colon, pancreas, testes, liver, brain, muscle and bone tumours. Cells from patients suffering from a proliferative disease may also be tested in the same way.

[0122] In addition, the identification of the genes described in the Examples will allow the role of these genes in hereditary diseases to be investigated. In general, this will involve establishing the status of the gene (e.g. using PCR sequence analysis), in cells derived from animals or humans with, for example, neurological disorders or neoplasms.

[0123] The probes as described here may conveniently be packaged in the form of a test kit in a suitable container. In such kits the probe may be bound to a solid support where the assay format for which the kit is designed requires such binding. The kit may also contain suitable reagents for treating the sample to be probed, hybridising the probe to nucleic acid in the sample, control reagents, instructions, and the like.

Homology Searching

[0124] Sequence homology (or identity) may be determined using any suitable homology algorithm, using for example default parameters.

[0125] Advantageously, the BLAST algorithm is employed, with parameters set to default values. The BLAST algorithm is described in detail at http://www.ncbi.nih.gov/BLAST/blast_help.html, which is incorporated herein by reference. The search parameters are defined as follows, and are advantageously set to the defined default parameters.

[0126] Advantageously, “substantial homology” when assessed by BLAST equates to sequences which match with an EXPECT value of at least about 7, preferably at least about 9 and most preferably 10 or more. The default threshold for EXPECT in BLAST searching is usually 10.

[0127] BLAST (Basic Local Alignment Search Tool) is the heuristic search algorithm employed by the programs blastp, blastn, blastx, tblastn, and tblastx; these programs ascribe significance to their findings using the statistical methods of Karlin and Altschul (see http://www.ncbi.nih.gov/BLAST/blast_help.html) with a few enhancements. The BLAST programs were tailored for sequence similarity searching, for example to identify homologues to a query sequence. The programs are not generally useful for motif-style searching. For a discussion of basic issues in similarity searching of sequence databases, see Altschul et al. (1994).

[0128] The five BLAST programs available at http://www.ncbi.nlm.nih.gov perform the following tasks:
[0129] blastp compares an amino acid query sequence against a protein sequence database;
[0130] blastn compares a nucleotide query sequence against a nucleotide sequence database;
[0131] blastx compares the six-frame conceptual translation products of a nucleotide query sequence (both strands) against a protein sequence database;
[0132] tblastn compares a protein query sequence against a nucleotide sequence database dynamically translated in all six reading frames (both strands).
[0133] tblastx compares the six-frame translations of a nucleotide query sequence against the six-frame translations of a nucleotide sequence database.

[0134] BLAST uses the following search parameters:

[0135] HISTOGRAM Display a histogram of scores for each search; default is yes. (See parameter H in the BLAST Manual).

[0136] DESCRIPTIONS Restricts the number of short descriptions of matching sequences reported to the number specified; default limit is 100 descriptions. (See parameter V in the manual page). See also EXPECT and CUTOFF.

[0137] ALIGNMENTS Restricts database sequences to the number specified for which high-scoring segment pairs (HSPs) are reported; the default limit is 50. If more database sequences than this happen to satisfy the statistical significance threshold for reporting (see EXPECT and CUTOFF below), only the matches ascribed the greatest statistical significance are reported. (See parameter B in the BLAST Manual).

[0138] EXPECT The statistical significance threshold for reporting matches against database sequences; the default value is 10, such that 10 matches are expected to be found merely by chance, according to the stochastic model of Karlin and Altschul (1990). If the statistical significance ascribed to a match is greater than the EXPECT threshold, the match will not be reported. Lower EXPECT thresholds are more stringent, leading to fewer chance matches being reported. Fractional values are acceptable. (See parameter E in the BLAST Manual).

[0139] CUTOFF Cutoff score for reporting high-scoring segment pairs. The default value is calculated from the EXPECT value (see above). HSPs are reported for a database sequence only if the statistical significance ascribed to them is at least as high as would be ascribed to a lone HSP having a score equal to the CUTOFF value. Higher CUTOFF values are more stringent, leading to fewer chance matches being reported. (See parameter S in the BLAST Manual). Typically, significance thresholds can be more intuitively managed using EXPECT.

[0140] MATRIX Specify an alternate scoring matrix for BLASTP, BLASTX, TBLASTN and TBLASTX. The default matrix is BLOSUM62 (Henikoff & Henikoff, 1992). The valid alternative choices include: PAM40, PAM120, PAM250 and IDENTITY. No alternate scoring matrices are available for BLASTN; specifying the MATRIX directive in BLASTN requests returns an error response.

[0141] STRAND Restrict a TBLASTN search to just the top or bottom strand of the database sequences; or restrict a BLASTN, BLASTX or TBLASTX search to just reading frames on the top or bottom strand of the query sequence.

[0142] FILTER Mask off segments of the query sequence that have low compositional complexity, as determined by the SEG program of Wootton & Federhen (1993) Computers and Chemistry 17:149-163, or segments consisting of short-periodicity internal repeats, as determined by the XNU program of Claverie & States (1993) Computers and Chemistry 17:191 -201, or, for BLASTN, by the DUST program of Tatusov and Lipman (see http://www.ncbi.nlm.nih.gov). Filtering can eliminate statistically significant but biologically uninteresting reports from the blast output (e.g., hits against common acidic-, basic- or proline-rich regions), leaving the more biologically interesting regions of the query sequence available for specific matching against database sequences.

[0143] Low complexity sequence found by a filter program is substituted using the letter “N” in nucleotide sequence (e.g., “NNNNNNNNNNNNN”) and the letter “X” in protein sequences (e.g., “XXXXXXXXX” ).

[0144] Filtering is only applied to the query sequence (or its translation products), not to database sequences. Default filtering is DUST for BLASTN; SEG for other programs.

[0145] It is not unusual for nothing at all to be masked by SEG, XNU, or both, when applied to sequences in SWISS-PROT, so filtering should not be expected to always yield an effect. Furthermore, in some cases, sequences are masked in their entirety, indicating that the statistical significance of any matches reported against the unfiltered query sequence should be suspect.

[0146] NCBI-gi Causes NCBI gi identifiers to be shown in the output, in addition to the accession and/or locus name.

[0147] Most preferably, sequence comparisons are conducted using the simple BLAST search algorithm provided at http://www.ncbi.nlm.nih.gov/BLAST.

Nucleic Acid Vectors

[0148] Polynucleotides as described in this document can be incorporated into a recombinant replicable vector. The vector may be used to replicate the nucleic acid in a compatible host cell. Thus in a further embodiment, we provide a method of making polynucleotides by introducing a polynucleotide as described here into a replicable vector, introducing the vector into a compatible host cell, and growing the host cell under conditions which bring about replication of the vector. The vector may be recovered from the host cell. Suitable host cells include bacteria such as E. coli, yeast, mammalian cell lines and other eukaryotic cell lines, for example insect Sf9 cells.

[0149] Preferably, a polynucleotide in a vector is operably linked to a control sequence that is capable of providing for the expression of the coding sequence by the host cell, i.e. the vector is an expression vector. The term “operably linked” means that the components described are in a relationship permitting them to function in their intended manner. A regulatory sequence “operably linked” to a coding sequence is ligated in such a way that expression of the coding sequence is achieved under condition compatible with the control sequences.

[0150] The control sequences may be modified, for example by the addition of further transcriptional regulatory elements to make the level of transcription directed by the control sequences more responsive to transcriptional modulators.

[0151] Vectors as described here may be transformed or transfected into a suitable host cell as described below to provide for expression of a protein. This process may comprise culturing a host cell transformed with an expression vector as described above under conditions to provide for expression by the vector of a coding sequence encoding the protein, and optionally recovering the expressed protein. Vectors will be chosen that are compatible with the host cell used.

[0152] The vectors may be for example, plasmid or virus vectors provided with an origin of replication, optionally a promoter for the expression of the said polynucleotide and optionally a regulator of the promoter. The vectors may contain one or more selectable marker genes, for example an ampicillin resistance gene in the case of a bacterial plasmid or a neomycin resistance gene for a mammalian vector. Vectors may be used, for example, to transfect or transform a host cell.

[0153] Control sequences operably linked to sequences encoding a polypeptide described here include promoters/enhancers and other expression regulation signals. These control sequences may be selected to be compatible with the host cell for which the expression vector is designed to be used in. The term promoter is well-known in the art and encompasses nucleic acid regions ranging in size and complexity from minimal promoters to promoters including upstream elements and enhancers.

[0154] The promoter is typically selected from promoters which are functional in mammalian cells, although prokaryotic promoters and promoters functional in other eukaryotic cells, such as insect cells, may be used. The promoter is typically derived from promoter sequences of viral or eukaryotic genes. For example, it may be a promoter derived from the genome of a cell in which expression is to occur. With respect to eukaryotic promoters, they may be promoters that function in a ubiquitous manner (such as promoters of α-actin, β-actin, tubulin) or, alternatively, a tissue-specific manner (such as promoters of the genes for pyruvate kinase). They may also be promoters that respond to specific stimuli, for example promoters that bind steroid hormone receptors. Viral promoters may also be used, for example the Moloney murine leukaemia virus long terminal repeat (MMLV LTR) promoter, the rous sarcoma virus (RSV) LTR promoter or the human cytomegalovirus (CMV) IE promoter.

[0155] It may also be advantageous for the promoters to be inducible so that the levels of expression of the heterologous gene can be regulated during the life-time of the cell. Inducible means that the levels of expression obtained using the promoter can be regulated.

[0156] In addition, any of these promoters may be modified by the addition of further regulatory sequences, for example enhancer sequences. Chimeric promoters may also be used comprising sequence elements from two or more different promoters described above.

[0157] The polynucleotides may also be inserted into the vectors described above in an antisense orientation to provide for the production of antisense RNA. Antisense RNA or other antisense polynucleotides may also be produced by synthetic means. Such antisense polynucleotides may be used in a method of controlling the levels of RNAs transcribed from genes comprising any one of the polynucleotides as described.

Host Cells

[0158] The vectors and polynucleotides may be introduced into host cells for the purpose of replicating the vectors/polynucleotides and/or expressing the polypeptides encoded by the polynucleotides described here. Although such polypeptides may be produced using prokaryotic cells as host cells, it is preferred to use eukaryotic cells, for example yeast, insect or mammalian cells, in particular mammalian cells.

[0159] Vectors/polynucleotides as described here may be introduced into suitable host cells using a variety of techniques known in the art, such as transfection, transformation and electroporation. Where vectors/polynucleotides are to be administered to animals, several techniques are known in the art, for example infection with recombinant viral vectors such as retroviruses, herpes simplex viruses and adenoviruses, direct injection of nucleic acids and biolistic transformation.

Protein Expression and Purfication

[0160] Host cells comprising polynucleotides as described here may be used to express polypeptides. Host cells may be cultured under suitable conditions which allow expression of the proteins. Expression of the polypeptides as described may be constitutive such that they are continually produced, or inducible, requiring a stimulus to initiate expression. In the case of inducible expression, protein production can be initiated when required by, for example, addition of an inducer substance to the culture medium, for example dexamethasone or IPTG.

[0161] Polypeptides can be extracted from host cells by a variety of techniques known in the art, including enzymatic, chemical and/or osmotic lysis and physical disruption.

[0162] The polypeptides may also be produced recombinantly in an in vitro cell-free system, such as the TnT™ (Promega) rabbit reticulocyte system.

Antibodies

[0163] We also provide monoclonal or polyclonal antibodies to polypeptides as described here, or fragments thereof. Thus, we further provide a process for the production of monoclonal or polyclonal antibodies to polypeptides.

[0164] If polyclonal antibodies are desired, a selected mammal (e.g., mouse, rabbit, goat, horse, etc.) is immunised with an immunogenic polypeptide bearing an epitope(s) from a polypeptide as described here. Serum from the immunised animal is collected and treated according to known procedures. If serum containing polyclonal antibodies to an epitope from a polypeptide contains antibodies to other antigens, the polyclonal antibodies can be purified by immunoaffinity chromatography. Techniques for producing and processing polyclonal antisera are known in the art. In order that such antibodies may be made, we also provide polypeptides as described here, or fragments thereof, haptenised to another polypeptide for use as immunogens in animals or humans.

[0165] Monoclonal antibodies directed against epitopes in the polypeptides described here can also be readily produced by one skilled in the art. The general methodology for making monoclonal antibodies by hybridomas is well known. Immortal antibody-producing cell lines can be created by cell fusion, and also by other techniques such as direct transformation of B lymphocytes with oncogenic DNA, or transfection with Epstein-Barr virus. Panels of monoclonal antibodies produced against epitopes in the polypeptides can be screened for various properties; i.e., for isotype and epitope affinity.

[0166] An alternative technique involves screening phage display libraries where, for example the phage express scFv fragments on the surface of their coat with a large variety of complementarity determining regions (CDRs). This technique is well known in the art.

[0167] Antibodies, both monoclonal and polyclonal, which are directed against epitopes from polypeptides described here are particularly useful in diagnosis, and those which are neutralising are useful in passive immunotherapy. Monoclonal antibodies, in particular, may be used to raise anti-idiotype antibodies. Anti-idiotype antibodies are immunoglobulins which carry an “internal image” of the antigen of the agent against which protection is desired.

[0168] Techniques for raising anti-idiotype antibodies are known in the art. These anti-idiotype antibodies may also be useful in therapy.

[0169] For the purposes of this document, the term “antibody”, unless specified to the contrary, includes fragments of whole antibodies which retain their binding activity for a target antigen. Such fragments include Fv, F(ab′) and F(ab′)₂ fragments, as well as single chain antibodies (scFv). Furthermore, the antibodies and fragments thereof may be humanised antibodies, for example as described in EP-A-239400.

[0170] Antibodies may be used in method of detecting polypeptides as described in this document present in biological samples by a method which comprises: (a) providing an antibody as described here; (b) incubating a biological sample with said antibody under conditions which allow for the formation of an antibody-antigen complex; and (c) determining whether antibody-antigen complex comprising said antibody is formed.

[0171] Suitable samples include extracts tissues such as brain, breast, ovary, lung, colon, pancreas, testes, liver, muscle and bone tissues or from neoplastic growths derived from such tissues.

[0172] Such antibodies may be bound to a solid support and/or packaged into kits in a suitable container along with suitable reagents, controls, instructions and the like.

Assays

[0173] We also provide assays that are suitable for identifying substances which bind to polypeptides as described here and which affect, for example, formation of the nuclear envelope, exit from the quiescent phase of the cell cycle (G0), G1 progression, chromosome decondensation, nuclear envelope breakdown, START, initiation of DNA replication, progression of DNA replication, termination of DNA replication, centrosome duplication, G2 progression, activation of mitotic or meiotic functions, chromosome condensation, centrosome separation, microtubule nucleation, spindle formation and function, interactions with microtubule motor proteins, chromatid separation and segregation, inactivation of mitotic functions, formation of contractile ring, cytokinesis functions, chromatin binding, formation of replication complexes, replication licensing, phosphorylation or other secondary modification activity, proteolytic degradation, microtubule binding, actin binding, septin binding, microtubule organising centre nucleation activity and binding to components of cell cycle signalling pathways.

[0174] In addition, assays suitable for identifying substances that interfere with binding of polypeptides as described here, where appropriate, to components of cell division cycle machinery. This includes not only components such as microtubules but also signalling components and regulatory components as indicated above. Such assays are typically in vitro. Assays are also provided that test the effects of candidate substances identified in preliminary in vitro assays on intact cells in whole cell assays. The assays described below, or any suitable assay as known in the art, may be used to identify these substances.

[0175] In particular, we provide for the use of a polynucleotide as set out in Table 5, or a polypeptide encoded by the polypeptide, in a method of identifying a substance capable of binding to the polypeptide, which method comprises incubating the polypeptide with a candidate substance under suitable conditions and determining whether the substance binds to the polypeptide.

[0176] We further provide for use of a polynucleotide as set out in Table 5, or a polypeptide encoded by the polypeptide, in a method of identifying a substance capable of modulating the function of the polypeptide, the method comprising the steps of: incubating the polypeptide with a candidate substance and determining whether activity of the polypeptide is thereby modulated.

[0177] The substance identified may be isolated or synthesised, and used for prevention, treatment or diagnosis of a disease in an individual. The substance may be adminstered to an individual in need of such treatment. Alternatively or in addition, the substance identified by the assay is administered to an individual in need of such treatment. Preferably, the polynucleotide comprises a human polypeptide as set out in column 3 of Table 5.

[0178] Therefore, we provide one or more substances identified by any of the assays described below, viz, mitosis assays, meiotic assays, polypeptide binding assays, microtubule binding/polymerisation assays, microtubule purification and binding assays, microtubule organising centre (MTOC) nucleation activity assays, motor protein assay, assay for spindle assembly and function, assays for dna replication, chromosome condensation assays, kinase assays, kinase inhibitor assays, and whole cell assays, each as described in further detail below.

Candidate Substances

[0179] A substance that inhibits cell cycle progression as a result of an interaction with a polypeptide as described here may do so in several ways. For example, if the substance inhibits cell division, mitosis and/or meiosis, it may directly disrupt the binding of a polypeptide as described here to a component of the spindle apparatus by, for example, binding to the polypeptide and masking or altering the site of interaction with the other component. A substance which inhibits DNA replication may do so by inhibiting the phosphorylation or de-phosphorylation of proteins involved in replication. For example, it is known that the kinase inhibitor 6-DMAP (6-dimethylaminopurine) prevents the initiation of replication (Blow, J J, 1993, J Cell Bioll 22,993-1002). Candidate substances of this type may conveniently be preliminarily screened by in vitro binding assays as, for example, described below and then tested, for example in a whole cell assay as described below. Examples of candidate substances include antibodies which recognise a polypeptide as described in this document.

[0180] A substance which can bind directly to such a polypeptide may also inhibit its function in cell cycle progression by altering its subcellular localisation and hence its ability to interact with its normal substrate. The substance may alter the subcellular localisation of the polypeptide by directly binding to it, or by indirectly disrupting the interaction of the polypeptide with another component. For example, it is known that interaction between the p68 and p180 subunits of DNA polymerase alpha-primase enzyme is necessary in order for p180 to translocate into the nucleus (Mizuno et al (1998) Mol Cell Biol 18,3552-62), and accordingly, a substance which disrupts the interaction between p68 and p180 will affect nuclear translocation and hence activity of the primase. A substance which affects mitosis may do so by preventing the polypeptide and components of the mitotic apparatus from coming into contact within the cell.

[0181] These substances may be tested using, for example the whole cells assays described below. Non-functional homologues of a polypeptide as described here may also be tested for inhibition of cell cycle progression since they may compete with the wild type protein for binding to components of the cell division cycle machinery whilst being incapable of the normal functions of the protein or block the function of the protein bound to the cell division cycle machinery. Such non-functional homologues may include naturally occurring mutants and modified sequences or fragments thereof.

[0182] Alternatively, instead of preventing the association of the components directly, the substance may suppress the biologically available amount of a polypeptide as described here. This may be by inhibiting expression of the component, for example at the level of transcription, transcript stability, translation or post-translational stability. An example of such a substance would be antisense RNA or double-stranded interfering RNA sequences which suppresses the amount of mRNA biosynthesis.

[0183] Suitable candidate substances include peptides, especially of from about 5 to 30 or 10 to 25 amino acids in size, based on the sequence of the polypeptides described in the Examples, or variants of such peptides in which one or more residues have been substituted. Peptides from panels of peptides comprising random sequences or sequences which have been varied consistently to provide a maximally diverse panel of peptides may be used.

[0184] Suitable candidate substances also include antibody products (for example, monoclonal and polyclonal antibodies, single chain antibodies, chimeric antibodies and CDR-grafted antibodies) which are specific for a polypeptide as described here. Furthermore, combinatorial libraries, peptide and peptide mimetics, defined chemical entities, oligonucleotides, and natural product libraries may be screened for activity as inhibitors of binding of a polypeptide as described here to the cell division cycle machinery, for example mitotic/meiotic apparatus (such as microtubules). The candidate substances may be used in an initial screen in batches of, for example 10 substances per reaction, and the substances of those batches which show inhibition tested individually. Candidate substances which show activity in in vitro screens such as those described below can then be tested in whole cell systems, such as mammalian cells which will be exposed to the inhibitor and tested for inhibition of any of the stages of the cell cycle.

Polypeptide Binding Assays

[0185] One type of assay for identifying substances that bind to a polypeptide as described here involves contacting a polypeptide as described here, which is immobilised on a solid support, with a non-immobilised candidate substance determining whether and/or to what extent the polypeptide as described here and candidate substance bind to each other. Alternatively, the candidate substance may be immobilised and the polypeptide non-immobilised.

[0186] In a preferred assay method, the polypeptide is immobilised on beads such as agarose beads. Typically this is achieved by expressing the component as a GST-fusion protein in bacteria, yeast or higher eukaryotic cell lines and purifying the GST-fusion protein from crude cell extracts using glutathione-agarose beads (Smith and Johnson, 1988). As a control, binding of the candidate substance, which is not a GST-fusion protein, to the immobilised polypeptide is determined in the absence of the polypeptide as described here. The binding of the candidate substance to the immobilised polypeptide is then determined. This type of assay is known in the art as a GST pulldown assay. Again, the candidate substance may be immobilised and the polypeptide non-immobilised.

[0187] It is also possible to perform this type of assay using different affinity purification systems for immobilising one of the components, for example Ni-NTA agarose and histidine-tagged components.

[0188] Binding of the polypeptide as described here to the candidate substance may be determined by a variety of methods well-known in the art. For example, the non-immobilised component may be labeled (with for example, a radioactive label, an epitope tag or an enzyme-antibody conjugate). Alternatively, binding may be determined by immunological detection techniques. For example, the reaction mixture can be Western blotted and the blot probed with an antibody that detects the non-immobilised component. ELISA techniques may also be used.

[0189] Candidate substances are typically added to a final concentration of from 1 to 1000 nmol/ml, more preferably from 1 to 100 nmol/ml. In the case of antibodies, the final concentration used is typically from 100 to 500 μg/ml, more preferably from 200 to 300 μg/ml.

[0190] Microtubule Binding/Polymerisation Assays

[0191] In the case of polypeptides as described here that bind to microtubules, another type of in vitro assay involves determining whether a candidate substance modulates binding of such a polypeptide to microtubules. Such an assay typically comprises contacting a polypeptide as described here with microtubules in the presence or absence of the candidate substance and determining if the candidate substance has an affect on the binding of the polypeptide as described here to the microtubules. This assay can also be used in the absence of candidate substances to confirm that a polypeptide as described here does indeed bind to microtubules. Microtubules may be prepared and assays conducted as follows:

[0192] Microtubule Purification and Binding Assays

[0193] Microtubules are purified from 0-3 h-old Drosophila embryos essentially as described previously (Saunders, et al., 1997). About 3 ml of embryos are homogenized with a Dounce homogenizer in 2 volumes of ice-cold lysis buffer (0.1 M Pipes/NaOH, pH6.6, 5 mM EGTA, 1 mM MgSO4, 0.9 M glycerol, 1 mM DTT, 1 mM PMSF, 1 μg/ml aprotinin, 1 μg/ml leupeptin and 1 μg/ml pepstatin). The microtubules are depolymerized by incubation on ice for 15 min, and the extract is then centrifuged at 16,000 g for 30 min at 4° C. The supernatant is recentrifuged at 135,000 g for 90 min at 4° C. Microtubules in this later supernatant are polymerized by addition of GTP to 1 mM and taxol to 20 μM and incubation at room temperature for 30 min. A 3 ml aliquot of the extract is layered on top of 3 ml 15% sucrose cushion prepared in lysis buffer. After centrifuging at 54,000g for 30 min at 20° C. using a swing out rotor, the microtubule pellet is resuspended in lysis buffer.

[0194] Microtubule overlay assays are performed as previously described (Saunders et al., 1997). 500 ng per lane of recombinant Asp, recombinant polypeptide, and bovine serum albumin (BSA, Sigma) are fractionated by 10% SDS-PAGE and blotted onto PVDF membranes (Millipore). The membranes are preincubated in TBST (50 mM Tris pH 7.5, 150 mM NaCl, 0.05% Tween 20) containing 5% low fat powdered milk (LFPM) for 1 h and then washed 3 times for 15 min in lysis buffer. The filters are then incubated for 30 minutes in lysis buffer containing either 1 mM GDP, 1 mM GTP, or 1 mM GTP-γ-S. MAP-free bovine brain tubulin (Molecular Probes) is polymerised at a concentration of 2 μg/ml in lysis buffer by addition of GTP to a final concentration of 1 mM and incubated at 37° C. for 30 min. The nucleotide solutions are removed and the buffer containing polymerised microtubules added to the membanes for incubation for 1 h at 37° C. with addition of taxol at a final concentration of 10 μM for the final 30 min. The blots are then washed 3 times with TBST and the bound tubulin detected using standard Western blot procedures using anti-β-tubulin antibodies (Boehringer Manheim) at 2.5 μg/ml and the Super Signal detection system (Pierce).

[0195] It may be desirable in one embodiment of this type of assay to deplete the polypeptide as described here from cell extracts used to produce polymerise microtubules. This may, for example, be achieved by the use of suitable antibodies.

[0196] A simple extension to this type of assay would be to test the effects of purified polypeptide as described here upon the ability of tubulin to polymerise in vitro (for example, as used by Andersen and Karsenti, 1997) in the presence or absence of a candidate substance (typically added at the concentrations described above). Xenopus cell-free extracts may conveniently be used, for example as a source of tubulin.

[0197] Microtubule Organising Centre (MTOC) Nucleation Activity Assays

[0198] Candidate substances, for example those identified using the binding assays described above, may be screening using a microtubule organising centre nucleation activity assay to determine if they are capable of disrupting MTOCs as measured by, for example, aster formation. This assay in its simplest form comprises adding the candidate substance to a cellular extract which in the absence of the candidate substance has microtubule organising centre nucleation activity resulting in formation of asters.

[0199] In a preferred embodiment, the assay system comprises (i) a polypeptide as described here and (ii) components required for microtubule organising centre nucleation activity except for functional polypeptide as described here, which is typically removed by immunodepletion (or by the use of extracts from mutant cells). The components themselves are typically in two parts such that microtubule nucleation does not occur until the two parts are mixed. The polypeptide as described here may be present in one of the two parts initially or added subsequently prior to mixing of the two parts.

[0200] Subsequently, the polypeptide as described here and candidate substance are added to the component mix and microtubule nucleation from centrosomes measured, for example by immunostaining for the polypeptide and visualising aster formation by immuno-fluorescence microscopy. The polypeptide may be preincubated with the candidate substance before addition to the component mix. Alternatively, both the polypeptide as described here and the candidate substance may be added directly to the component mix, simultaneously or sequentially in either order.

[0201] The components required for microtubule organising centre formation typically include salt-stripped centrosomes prepared as described in Moritz et al., 1998. Stripping centrosome preparations with 2 M KI removes the centrosome proteins CP60, CP 190, CNN and γ-tubulin. Of these, neither CP60 nor CP190 appear to be required for microtubule nucleation. The other minimal components are typically provided as a depleted cellular extract, or conveniently, as a cellular extract from cells with a non-functional variant of a polypeptide as described here. Typically, labeled tubulin (usually β-tubulin) is also added to assist in visualising aster formation.

[0202] Alternatively, partially purified centrosomes that have not been salt-stripped may be used as part of the components. In this case, only tubulin, preferably labeled tubulin is required to complete the component mix.

[0203] Candidate substances are typically added to a final concentration of from 1 to 1000 nmol/ml, more preferably from 1 to 100 nmol/ml. In the case of antibodies, the final concentration used is typically from 100 to 500 μg/ml, more preferably from 200 to 300 μg/ml.

[0204] The degree of inhibition of aster formation by the candidate substance may be determined by measuring the number of normal asters per unit area for control untreated cell preparation and measuring the number of normal asters per unit area for cells treated with the candidate substance and comparing the result. Typically, a candidate substance is considered to be capable of disrupting MTOC integrity if the treated cell preparations have less than 50%, preferably less than 40, 30, 20 or 10% of the number of asters found in untreated cells preparations. It may also be desirable to stain cells for γ-tubulin to determine the maximum number of possible MTOCs present to allow normalisation between samples.

[0205] Motor Protein Assay

[0206] The polypeptides may interact with motor proteins such as the Eg5-like motor protein in vitro. The effects of candidate substances on such a process may be determined using assays wherein the motor protein is immobilised on coverslips. Rhodamine labeled microtubules are then added and their translocation can be followed by fluorescent microscopy. The effect of candidate substances may thus be determined by comparing the extent and/or rate of translocation in the presence and absence of the candidate substance. Generally, candidate substances known to bind to a polypeptide as described here, would be tested in this assay. Alternatively, a high throughput assay may be used to identify modulators of motor proteins and the resulting identified substances tested for affects on a polypeptide as described above.

[0207] Typically this assay uses microtubules stabilised by taxol (e.g. Howard and Hyman 1993; Chandra and Endow, 1993—both chapters in “Motility Assays for Motor Proteins” Ed Jon Scholey, pub Academic Press). If however, a polypeptide as described here were to promote stable polymerisation of microtubules (see above) then these microtubules could be used directly in motility assays.

[0208] Simple protein-protein binding assays as described above, using a motor protein and a polypeptide as described here may also be used to confirm that the polypeptide binds to the motor protein, typically prior to testing the effect of candidate substances on that interaction.

[0209] Assay for Spindle Assembly and Function

[0210] A further assay to investigate the function of polypeptide as described here and the effect of candidate substances on those functions is an assay which measures spindle assembly and function. Typically, such assays are performed using Xenopus cell free systems, where two types of spindle assembly are possible. In the “half spindle” assembly pathway, a cytoplasmic extract of CSF arrested oocytes is mixed with sperm chromatin. The half spindles that form subsequently fuse together. A more physiological method is to induce CSF arrested extracts to enter interphase by addition of calcium, whereupon the DNA replicates and kinetochores form. Addition of fresh CSF arrested extract then induces mitosis with centrosome duplication and spindle formation (for discussion of these systems see Tournebize and Heald, 1996).

[0211] Again, generally, candidate substances known to bind to a polypeptide as described here, or non-functional polypeptide variants, would be tested in this assay. Alternatively, a high throughput assay may be used to identify modulators of spindle formation and function and the resulting identified substances tested for affects binding of the polypeptide as described above.

[0212] Assays for DNA Replication

[0213] Another assay to investigate the function of polypeptide as described here and the effect of candidate substances on those functions is as assay for replication of DNA. A number of cell free systems have been developed to assay DNA replication. These can be used to assay the ability of a substance to prevent or inhibit DNA replication, by conducting the assay in the presence of the substance. Suitable cell-free assay systems include, for example the SV-40 assay (Li and Kelly, 1984, Proc. Natl. Acad. Sci USA 81, 6973-6977; Waga and Stillman, 1994, Nature 369, 207-212.). A Drosophila cell free replication system, for example as described by Crevel and Cotteril (1991), EMBO J 10, 4361-4369, may also be used. A preferred assay is a cell free assay derived from Xenopus egg low speed supernatant extracts described in Blow and Laskey (1986, Cell 47,577-587) and Sheehan et al. (1988, J Cell Biol. 106, 1-12), which measures the incorporation of nucleotides into a substrate consisting of Xenopus sperm DNA or HeLa nuclei. The nucleotides may be radiolabelled and incorporation assayed by scintillation counting. Alternatively and preferably, bromo-deoxy-uridine (BrdU) is used as a nucleotide substitute and replication activity measured by density substitution. The latter assay is able to distinguish genuine replication initiation events from incorporation as a result of DNA repair. The human cell-free replication assay reported by Krude, et al (1997), Cell 88, 109-19 may also be used to assay the effects of substances on the polypeptides.

[0214] Other In Vitro Assays

[0215] Other assays for identifying substances that bind to a polypeptide as described here are also provided. For example, substances which affect chromosome condensation may be assayed using the in vitro cell free system derived from Xenopus eggs, as known in the art.

[0216] Substances which affect kinase activity or proteolysis activity are of interest. It is known, for example, that temporal control of ubiquitin-proteasome mediated protein degradation is critical for normal G1 and S phase progression (reviewed in Krek 1998, Curr Opin Genet Dev 8, 36-42). A number of E3 ubiquitin protein ligases, designated SCFs (Skp1-cullin-F-box protein ligase complexes), confer substrate specificity on ubiquitination reactions, while protein kinases phosphorylate substrates destined for destruction and convert them into preferred targets for ubiquitin modification catalyzed by SCFs. Furthermore, ubiquitin-mediated proteolysis due to the anaphase-promoting complex/cyclosome (APC/C) is essential for separation of sister chromatids during mitosis, and exit from mitosis (Listovsky et al., 2000, Exp Cell Res 255, 184-191).

[0217] Substances which inhibit or affect kinase activity may be identified by means of a kinase assay as known in the art, for example, by measuring incorporation of ³²P into a suitable peptide or other substrate in the presence of the candidate substance. Similarly, substances which inhibit or affect proteolytic activity may be assayed by detecting increased or decreased cleavage of suitable polypeptide substrates.

[0218] Assays for these and other protein or polypeptide activities are known to those skilled in the art, and may suitably be used to identify substances which bind to a polypeptide and affect its activity.

[0219] Whole Cell Assays

[0220] Candidate substances may also be tested on whole cells for their effect on cell cycle progression, including mitosis and/or meiosis. Preferably the candidate substances have been identified by the above-described in vitro methods. Alternatively, rapid throughput screens for substances capable of inhibiting cell division, typically mitosis, may be used as a preliminary screen and then used in the in vitro assay described above to confirm that the affect is on a particular polypeptide.

[0221] The candidate substance, i.e. the test compound, may be administered to the cell in several ways. For example, it may be added directly to the cell culture medium or injected into the cell. Alternatively, in the case of polypeptide candidate substances, the cell may be transfected with a nucleic acid construct which directs expression of the polypeptide in the cell. Preferably, the expression of the polypeptide is under the control of a regulatable promoter.

[0222] Typically, an assay to determine the effect of a candidate substance identified by the method as described here on a particular stage of the cell division cycle comprises administering the candidate substance to a cell and determining whether the substance inhibits that stage of the cell division cycle. Techniques for measuring progress through the cell cycle in a cell population are well known in the art. The extent of progress through the cell cycle in treated cells is compared with the extent of progress through the cell cycle in an untreated control cell population to determine the degree of inhibition, if any. For example, an inhibitor of mitosis or meiosis may be assayed by measuring the proportion of cells in a population which are unable to undergo mitosis/meiosis and comparing this to the proportion of cells in an untreated population.

[0223] The concentration of candidate substances used will typically be such that the final concentration in the cells is similar to that described above for the in vitro assays.

[0224] A candidate substance is typically considered to be an inhibitor of a particular stage in the cell division cycle (for example, mitosis) if the proportion of cells undergoing that particular stage (i.e., mitosis) is reduced to below 50%, preferably below 40, 30, 20 or 10% of that observed in untreated control cell populations.

Therapeutic Uses

[0225] Many tumours are associated with defects in cell cycle progression, for example loss of normal cell cycle control. Tumor cells may therefore exhibit rapid and often aberrant mitosis. One therapeutic approach to treating cancer may therefore be to inhibit mitosis in rapidly dividing cells. Such an approach may also be used for therapy of any proliferative disease in general. Thus, since the polypeptides described here appear to be required for normal cell cycle progression, they represent targets for inhibition of their functions, particularly in tumor cells and other proliferative cells.

[0226] The term proliferative disorder is used herein in a broad sense to include any disorder that requires control of the cell cycle, for example, cardiovascular disorders such as restenosis and cardiomyopathy, auto-immune disorders such as glomerulonephritis and rheumatoid arthritis, dermatological disorders such as psoriasis, anti-inflammatory, anti-fingal, antiparasitic disorders such as malaria, emphysema and alopecia.

[0227] One possible approach is to express anti-sense constructs directed against polynucleotides described in this document, preferably selectively in tumor cells, to inhibit gene function and prevent the tumor cell from progressing through the cell cycle. Anti-sense constructs may also be used to inhibit gene function to prevent cell cycle progression in a proliferative cell. Such anti-sense constructs may comprise anti-sense molecules corresponding to any of the polynucleotides, in particular, those identified in Table 5.

[0228] Alternatively, or in addition, RNAi may be used to modulate expression of the polynucleotide in a cell. Double stranded RNA may be made as described in the Examples, e.g., by transcribing both strands of a polynucleotide sequence in a suitable vector (e.g., from T7 or other promoters on either side of the cloned sequence), denatured and annealed. The double stranded RNA (ds RNA) may then be introduced into a relevant cell to inhibit the transcription or expression of the relevant polynucleotide or polypeptide.

[0229] We therefore describe a method of modulating, preferably down-regulating, the expression of a polynucleotide as described here, preferably a polynucleotide as set out in Table 5 in a cell, the method comprising introducing a double stranded RNA (dsRNA) corresponding to the polynucleotide, or an antisense RNA corresponding to the polynucleotide, or a fragment thereof, into the cell.

[0230] Another approach is to use non-functional variants of the polypeptides that compete with the endogenous gene product for cellular components of cell cycle machinery, resulting in inhibition of function. Alternatively, compounds identified by the assays described above as binding to a polypeptide may be administered to tumor or proliferative cells to prevent the function of that polypeptide. This may be performed, for example, by means of gene therapy or by direct administration of the compounds. Suitable antibodies may also be used as therapeutic agents.

[0231] Alternatively, double-stranded (ds) RNA is a powerful way of interfering with gene expression in a range of organisms that has recently been shown to be successful in mammals (Wianny and Zernicka-Goetz, 2000, Nat Cell Biol 2000, 2, 70-75). Double stranded RNA corresponding to the sequence of a polynucleotide can be introduced into or expressed in oocytes and cells of a candidate organism to interfere with cell division cycle progression.

[0232] In addition, a number of the mutations described herein exhibit aberrant meiotic phenotypes. Aberrant meiosis is an important factor in infertility since mutations that affect only meiosis and not mitosis will lead to a viable organism but one that is unable to produce viable gametes and hence reproduce. Consequently, the elucidation of genes involved in meiosis is an important step in diagnosing and preventing/treating fertility problems. Thus the polypeptides identified in mutant Drosophila having meiotic defects (as is clearly indicated in the Examples) may be used in methods of identifying substances that affect meiosis. In addition, these polypeptides, and corresponding polynucleotides, may be used to study meiosis and identify possible mutations that are indicative of infertility. This will be of use in diagnosing infertility problems.

Administration

[0233] Substances identified or identifiable by the assay methods described here may preferably be combined with various components to produce compositions. Preferably the compositions are combined with a pharmaceutically acceptable carrier or diluent to produce a pharmaceutical composition (which may be for human or animal use). Suitable carriers and diluents include isotonic saline solutions, for example phosphate-buffered saline. The composition as described here may be administered by direct injection. The composition may be formulated for parenteral, intramuscular, intravenous, subcutaneous, intraocular or transdermal administration. Typically, each protein may be administered at a dose of from 0.01 to 30 mg/kg body weight, preferably from 0.1 to 10 mg/kg, more preferably from 0.1 to 1 mg/kg body weight.

[0234] Polynucleotides/vectors encoding polypeptide components (or antisense constructs) for use in inhibiting cell cycle progression, for example, inhibiting mitosis or meiosis, may be administered directly as a naked nucleic acid construct. They may further comprise flanking sequences homologous to the host cell genome. When the polynucleotides/vectors are administered as a naked nucleic acid, the amount of nucleic acid administered may typically be in the range of from 1 μg to 10 mg, preferably from 100 μg to 1 mg. It is particularly preferred to use polynucleotides/vectors that target specifically tumor or proliferative cells, for example by virtue of suitable regulatory constructs or by the use of targeted viral vectors.

[0235] Uptake of naked nucleic acid constructs by mammalian cells is enhanced by several known transfection techniques for example those including the use of transfection agents. Example of these agents include cationic agents (for example calcium phosphate and DEAE-dextran) and lipofectants (for example lipofectam™ and transfectam™). Typically, nucleic acid constructs are mixed with the transfection agent to produce a composition.

[0236] Preferably the polynucleotide, polypeptide, compound or vector described here may be conjugated, joined, linked, fused, or otherwise associated with a membrane translocation sequence.

[0237] Preferably, the polynucleotide, polypeptide, compound or vector, etc described here may be delivered into cells by being conjugated with, joined to, linked to, fused to, or otherwise associated with a protein capable of crossing the plasma membrane and/or the nuclear membrane (i.e., a membrane translocation sequence). Preferably, the substance of interest is fused or conjugated to a domain or sequence from such a protein responsible for the translocational activity. Translocation domains and sequences for example include domains and sequences from the HIV-1-trans-activating protein (Tat), Drosophila Antennapedia homeodomain protein and the herpes simplex-1 virus VP22 protein. In a highly preferred embodiment, the substance of interest is conjugated with penetratin protein or a fragment of this. Penetratin comprises the sequence RQIKIWFQNRRMKWKK (SEQ ID NO:1) and is described in Derossi, et al., (1994), J. Biol. Chem. 269, 10444-50; use of penetratin-drug conjugates for intracellular delivery is described in WO/00/01417. Truncated and modified forms of penetratin may also be used, as described in WO/00/29427.

[0238] Preferably the polynucleotide, polypeptide, compound or vector is combined with a pharmaceutically acceptable carrier or diluent to produce a pharmaceutical composition. Suitable carriers and diluents include isotonic saline solutions, for example phosphate-buffered saline. The composition may be formulated for parenteral, intramuscular, intravenous, subcutaneous, intraocular or transdermal administration.

[0239] The routes of administration and dosages described are intended only as a guide since a skilled practitioner will be able to determine readily the optimum route of administration and dosage for any particular patient and condition.

Further Aspects

[0240] Further aspects of the invention are set out in the following numbered paragraphs; it is to be understood that the invention includes these aspects.

[0241] Paragraph 1. A polynucleotide selected from: (a) polynucleotides encoding any one of the polypeptide sequences set out in Examples 1 to 30 or the complement thereof; (b) polynucleotides comprising a nucleotide sequence capable of hybridising to the polynucleotides defined in (a) above, or a fragment thereof; (c) polynucleotides comprising a nucleotide sequence capable of hybridising to the complement of the polynucleotides defined in (a) above, or a fragment thereof; (d) polynucleotides comprising a polynucleotide sequence which is degenerate as a result of the genetic code to the polynucleotides defined in (a), (b) or (c).

[0242] Paragraph 2. A polynucleotide selected from: (a) polynucleotides encoding any one of the polypeptide sequences set out in Examples 1, 2, 2A, 2B and 2C or the complement thereof; (b) polynucleotides comprising a nucleotide sequence capable of hybridising to the polynucleotides defined in (a) above, or a fragment thereof; (c) polynucleotides comprising a nucleotide sequence capable of hybridising to the complement of the polynucleotides defined in (a) above, or a fragment thereof; (d) polynucleotides comprising a polynucleotide sequence which is degenerate as a result of the genetic code to the polynucleotides defined in (a), (b) or (c).

[0243] Paragraph 3. A polynucleotide selected from: (a) polynucleotides encoding any one of the polypeptide sequences set out in Examples 3 to 9 and 9A or the complement thereof; (b) polynucleotides comprising a nucleotide sequence capable of hybridising to the polynucleotides defined in (a) above, or a fragment thereof; (c) polynucleotides comprising a nucleotide sequence capable of hybridising to the complement of the polynucleotides defined in (a) above, or a fragment thereof;(d) polynucleotides comprising a polynucleotide sequence which is degenerate as a result of the genetic code to the polynucleotides defined in (a), (b) or (c).

[0244] Paragraph 4. A polynucleotide selected from: (a) polynucleotides encoding any one of the polypeptide sequences set out in Examples 10 to 29 or the complement thereof; (b) polynucleotides comprising a nucleotide sequence capable of hybridising to the polynucleotides defined in (a) above, or a fragment thereof; (c) polynucleotides comprising a nucleotide sequence capable of hybridising to the complement of the polynucleotides defined in (a) above, or a fragment thereof; (d) polynucleotides comprising a polynucleotide sequence which is degenerate as a result of the genetic code to the polynucleotides defined in (a), (b) or (c).

[0245] Paragraph 5. A polynucleotide probe which comprises a fragment of at least 15 nucleotides of a polynucleotide according to any of Paragraph s 1 to 4.

[0246] Paragraph 6. A polypeptide which comprises any one of the amino acid sequences set out in Examples 1 to 30 or in any of Examples 1 to 2, 2A, 2B and 2C, Examples 3 to 9 and 9A and Examples 10 to 29 or a homologue, variant, derivative or fragment thereof.

[0247] Paragraph 7. A polynucleotide encoding a polypeptide according to Paragraph 6.

[0248] Paragraph 8. A vector comprising a polynucleotide according to any of Paragraph s 1 to 5 and 7.

[0249] Paragraph 9. An expression vector comprising a polynucleotide according to any of Paragraph s 1 to 5 and 7 operably linked to a regulatory sequence capable of directing expression of said polynucleotide in a host cell.

[0250] Paragraph 10. An antibody capable of binding a polypeptide according to Paragraph 6.

[0251] Paragraph 11. A method for detecting the presence or absence of a polynucleotide according to any of Paragraph s 1 to 5 and 7 in a biological sample which comprises: (a) bringing the biological sample containing DNA or RNA into contact with a probe according to Paragraph under hybridising conditions; and (b) detecting any duplex formed between the probe and nucleic acid in the sample.

[0252] Paragraph 12. A method for detecting a polypeptide according to Paragraph 6 present in a biological sample which comprises: (a) providing an antibody according to Paragraph 10; (b) incubating a biological sample with said antibody under conditions which allow for the formation of an antibody-antigen complex; and (c) determining whether antibody-antigen complex comprising said antibody is formed.

[0253] Paragraph 13. A polynucleotide according to according to any of Paragraph s 1 to 5 and 7 for use in therapy.

[0254] Paragraph 14. A polypeptide according to Paragraph 6 for use in therapy.

[0255] Paragraph 15. An antibody according to Paragraph 10 for use in therapy.

[0256] Paragraph 16. A method of treating a tumor or a patient suffering from a proliferative disease comprising administering to a patient in need of treatment an effective amount of a polynucleotide according to any of Paragraph s 1 to 5 and 7.

[0257] Paragraph 17. A method of treating a tumor or a patient suffering from a proliferative disease, comprising administering to a patient in need of treatment an effective amount of a polypeptide according to Paragraph 6.

[0258] Paragraph 18. A method of treating a tumor or a patient suffering from a proliferative disease, comprising administering to a patient in need of treatment an effective amount of an antibody according to Paragraph 10 to a patient.

[0259] Paragraph 19. Use of a polypeptide according to Paragraph 6 in a method of identifying a substance capable of affecting the function of the corresponding gene.

[0260] Paragraph 20. Use of a polypeptide according to Paragraph 6 in an assay for identifying a substance capable of inhibiting the cell division cycle.

[0261] Paragraph 21. Use as Paragraph ed in Paragraph 20, in which the substance is capable of inhibiting mitosis and/or meiosis.

[0262] Paragraph 22. A method for identifying a substance capable of binding to a polypeptide according to Paragraph 6, which method comprises incubating the polypeptide with a candidate substance under suitable conditions and determining whether the substance binds to the polypeptide.

[0263] Paragraph 23. A method for identifying a substance capable of modulating the function of a polypeptide according to Paragraph 6 or a polypeptide encoded by a polynucleotide according to any of Paragraph s 1 to 5 and 7, the method comprising the steps of: incubating the polypeptide with a candidate substance and determining whether activity of the polypeptide is thereby modulated.

[0264] Paragraph 24. A substance identified by a method or assay according to any of Paragraph s 19 to23.

[0265] Paragraph 25. Use of a substance according to Paragraph 24 in a method of inhibiting the function of a polypeptide.

[0266] Paragraph 26. Use of a substance according to Paragraph 24 in a method of regulating a cell division cycle function.

[0267] Paragraph 27. A method of identifying a human nucleic acid sequence, by: (a) selecting a Drosophila polypeptide identified in any of Examples 1 to 30; (b) identifying a corresponding human polypeptide; (c) identifying a nucleic acid encoding the polypeptide of (b).

[0268] Paragraph 28. A method according to Paragraph 27, in which a human homologue of the Drosophila sequence, or a human sequence similar to the Drosophila sequence, is identified in step (b).

[0269] Paragraph 29. A method according to Paragraph 27 or 28, in which the human polypeptide has at least one of the biological activities, preferably substantially all the biological activities of the Drosophila polypeptide.

[0270] Paragraph 30. A human polypeptide identified by a method according to Paragraph 27, 28 or 29.

[0271] The invention will now be further described by way of Examples, which are meant to serve to assist one of ordinary skill in the art in carrying out the invention and are not intended in any way to limit the scope of the invention.

### EXAMPLE

### Example Section A

### Identification of Human Cell Cycle Genes

[0272] Introduction

[0273] In order to identify new cell cycle regulatory genes in Drosophila and their human counterparts, we investigated 33 fly lines obtained by P-element mutagenesis carried out on the X chromosome. All those fly lines are screened directly for mitotic phenotypes at developmental stages where division is crucial (i.e. the syncytial embryo, larval brains, and male and female meiosis). In each case, the P-element insertion site is identified leading to the selection of 62 genes flanking the insertion site.

[0274] In order to clarify the identity of the mutated “mitotic genes”, we use an RNAi-based knockdown approach in cultured Drosophila cells followed by FACS analysis, mitotic index evaluation (Cellomics Arrayscan) and immunofluorescence observations of mitotic phenotypes for all 63 genes.

[0275] The microscope phenotyping approach led to the identification of 30 gene candidates that are required for cell cycle progression, some of which are also detected as presenting some changes in the FACS profile and/or in the mitotic index (see Table 5 for a full summary). Data relating to these genes is presented in Examples Section B, Examples 1 to 29 below.

[0276] These genes encode a variety of novel proteins: 6 protein kinases; 2 protein phosphatases, 2 proteins of the ubiquitin-mediated protein degradation pathway, a cytosketal protein, a microtubule-binding protein, a homologue of a suspected kinesin-like protein, a RNA polymerase 2 associated cyclin, a ribosomal protein; a protein involved in retrograde (Golgi to ER) transport, a member of the family of thioredoxin reductases, a hydroxymethyltransferase, a Cdk associated protein, an RNA binding protein, an O-acetyl transferase and 9 other novel proteins with no particularly characteristic identifying features.

[0277] Human counterparts of the selected genes are identified and tested as described below. A short list of Drosophila and human genes and proteins useful for screening for anti-proliferative molecules is presented as Table 5.

TABLE 5
Short list of potentially new interesting gene candidates

| Drosophila Gene | | Human Homologue Accession |
|---|---|---|
| Name | Human Homologue Gene Name | Number |
| CG2028 | Casein kinase I | P48729 |
| CG3011 | Serine hydroxymethyl transferase | AAA63258 |
| CG15309 | DiGeorge syndrome related protein | AAL09354 |
| | FKSG4 | |
| CG15305 | Human homologue of CG15305 | None |
| CG2222 | Hypothetical protein FLJ13912 | NP_073607 |
| CG2938 | CAS1 O-acetyltransferase | NP_075051 |
| CG1524 | Ribosomal protein S14 | A25220 |
| CG10778 | Hypothetical protein FLJ13102 | NP_079163 |
| | (kinesin like) | |
| CG18292 | Cdk associated protein 1 (deleted in | BAA22937 |
| | oral cancer) | |
| CG10701 | Moesin | A41289 |
| CG10648 | Mak16-like RNA binding protien | NP_115898 |
| CG2854 | CAD38627 hypothetical protein | CAD38627 |
| CG2845 | B-raf | AAA35609 |
| CG1486 | BAA19780 novel protein | BAA19780 |
| CG10964 | 11-cis retinal dehydrogenase | AAC50725 |
| CG2151 | Thioredoxin reductase beta | XP_033135 |
| CG10988 | Gamma tubulin ring complex 3 | AAC39727 |
| CG1558 | Human homologue of CG1558 | NONE |
| CG11697 | Novel protein | BAB14444 unamed protein - similar |
| | | to a hypothetical protein in the |
| | | region deleted in human familial |
| CG3954 | Protein tyrosine phosphatase non- | AAH08692 |
| | receptor type 11 (Shp2) | |
| CG16903 | Cyclin L ania-6a | AAD53184 |
| CG16983 | Skp1 ubiquitin ligase | XP_054159 |
| CG13363 | CGI-85 | NP_057112 |
| CG18319 | Ubc13 ubiquitin conjugating enzyme | BAA11675 |
| CG14813 | archain | CAA57071 |
| CG8655 | Cdc7 | AAB97512 |
| CG2621 | GSK 3 beta | NP_002084 |
| CG1725 | Dlg1/Dlg2 | XP_012060 |
| CG1594 | JAK-2 Janus kinase 2 | NP_004963 |
| CG2096 | Protein phosphatase 1 | NP_002700 |

[0278] Results

[0279] Table 6 shows all significant cell cycle phenotypes observed after RNAi with the Drosophila genes flanking P-element insertion sites identified in Examples 1 to 29. The PCR primers used to create the double stranded RNA (see Materials and Methods above) are shown in each case together with the RNA ID number. Results derived from Facs analysis of cell cycle compartment, mitotic index as determined by the Cellomics mitotic index assay, and cellular phenotypes determined by microscopy are shown.

[0280] FACS Analysis of Cell Cycle

[0281] FACS analysis is used to assess the effects of Drosophila gene specific RNAi on the cell cycle. Through the determination of the DNA content by propidium iodide quantitation, any changes in the cell cycle distribution in sub-G1 (apoptotic), G1, G2/M can be observed. 24 genes in the Facs assessment present some changes in cell cycle distribution. (Table 6).

[0282] Mitotic Index Evaluation with Cellomics Arrayscan

[0283] An evaluation of mitotic index is performed using the Cellomics arrayscan and the Cellomics proprietary mitotic index HitKit procedure (see Materials and Methods above).

[0284] The basic principle of this method is that cells in mitosis are decorated by an antibody directed against a specific mitotic marker. Their proportion relatively to the total number of cells is determined, giving a proportion of cells in mitosis. This automated method presents the advantage of being more rapid than the microscope observations, however it only measures one feature of the cycling cells. Some mitotic genes that do not significantly affect the overall proportion of cells in mitosis will therefore not be detected. The reverse is also true as the knockdown of some gene products might affect the mitotic index without displaying any obvious increase in chromosomal or spindle defects. Table 6 presents data only where there was a statistically significant variation in the mitotic index (determined by a Ttest value of <0.1) as compared to the RFP RNAi control.

[0285] An increase in mitotic index can indicate that the knockdown of a gene essential for completion of mitosis has blocked more cells in mitosis, however many of the gene knockdowns listed in Table 6 result in a decrease in the mitotic index, suggesting that the population of cells overall are spending less time in mitosis. Possible interpretations of this, are that defects in the centrosome duplication cycle block some cells in G1/S and they are unable to enter mitosis, or that defects in cytokinesis block cells on the exit from mitosis at a point after the assay specific marker is lost. The loss of checkpoints at mitosis may also allow cells to move faster through mitosis. The increase in mitotic defects observed for most of these genes might then be the result of this lack of checkpoint control.

[0286] 13 genes in the phenotype assessment present some changes in the mitotic index (Table 6).

[0287] Microscope Observation and Cellular Phenotyping

[0288] The primary goal of the cell phenotype assessment is to find abnormalities in the following: chromosome number in prometaphase (ploidy), chromosome behaviour in metaphase or anaphase, spindle morphology, number of centrosomes, and cell viability. The secondary goal of the assessment is to evaluate and quantify these abnormalities, this is an essential step as control cells also present some defects.

[0289] The wild-type Drosophila DMEL2 cells present a large range and a significant proportion of chromosomal defects (between 30-40%). Therefore, between 300 and 500 mitotic cells were counted for each experiment in order to obtain a statistically significant evaluation of any change in the proportion of defects. The cells categorized as presenting chromosomal defects in the study encompass aneuploid and polyploid prometaphase cells, cells that apparently fail to align their chromosomes at metaphase and the cells with lagging or stretched chromosomes in anaphase. Spindle defects are also noted, but not quantified in the same group. Some candidates are also noted as presenting a significant decrease in the number of mitotic cells (mitotic index) or as affecting the viability of the cells (decrease in cell confluency or presence of apoptotic cells).

[0290] A noteworthy observation is that it is difficult to find a unique representative phenotype for most of the genes tested. Rather than one gene=one phenotype, an overall increase in the different categories of chromosomal defects is observed. However, one can often see a more significant increase in one particular subcategory of defects as for example in the proportion of lagging chromatids or the number of centrosomes.

[0291] Table 6 describes the data obtained from these studies for genes where a significant phenotype is observed. 30 of the candidate genes show a significant phenotype, 26 of which show an increase in chromosomal defects. This increase in mitotic chromosome behaviour abnormalities is sometimes associated with an increase in mitotic spindle defects. Of the remaining 4 with no increase in chromosomal defects, CG1725 (RNA528/529) shows a clear increase in spindle defects, with CG1524 (RNA 482/483) there are not enough mitotic cells to do a proper quantification (as the gene product is a ribosomal protein, it is highly probable that its inactivation results in a net increase in the proportion of cell death explaining the drop in cell confluency also observed) and for CG14813 (RNA 586/587), a large proportion of cells are dying and there is an obvious decrease in the number of mitotic cells, this might affect the relative proportion of normal and abnormal mitotic cells. Finally CG10648 (RNA 488/489) had a lower proportion of chromosomal defects but a high proportion of monopolar and small spindles. The proportion of prometaphase cells and apoptotic cells was also high.

[0292] Conclusion

[0293] From a collection of Drosophila P-element insertion lines which display phenotypes consistent with an effect on mitosis we derived a series of novel Drosophila and human genes which represent targets for the development of anti-proloiferative therapies. We used three different approaches to validate the role of each gene in the cell cycle and to gather phenotype information following an RNAi-based gene knockdown approach.

[0294] Table 5 shows a short list of 30 new interesting human genes demonstrated to play a role in mitosis. This short list is mainly based on the results of the detailed microscope phenotype evaluation (see Table 6), although all of the 42 genes listed in Table 6 show a cell cycle related phenotype in one or more of the 3 assays.

Materials and Methods

[0295] Generation and Identification of Lethal, Semi-Lethal and Sterile X Chromosome Mutants Having Defects in Mitosis and/or Meiosis

[0296] P-Element Mutagenesis

[0297] Transposable elements are widely used for mutagenesis in Drosophila melanogaster as they couple the advantages of providing effective genetic lesions with ease of detecting disrupted genes for the purpose of molecular cloning. To achieve near saturation of the genome with mutations resulting from mobilisation of the P-lacW transposon (a P-element marked with a mini-white gene, bearing the E.coli lacZ gene as an enhancer trap, and an E. coli replicon and ampicillin resistance gene to facilitate ‘plasmid rescue’ of sequences at the site of the P-insertion), Drosophila females that are homozygous for P-lacW(inserted on the second chromosome) are crossed with males carrying the transposase source P(A2-3) (Deak et al., 1997). Random transpositions of the mutator element are then ‘captured’ in lines lacking transposase activity. Stable, or balanced, stocks bearing single lethal P-lacW insertions are made to give a collection of 501 lines (Peter et al., submitted) and a further 73 lines that are either sterile or carry a mutation giving a visible morphological phenotype.

[0298] Screening for Mitotic and Meiotic Defects

[0299] About half of the mutants in the collection are embryonic lethals.

[0300] Screens for mutants affecting spermatogenesis within this collection of 501 recessive lethal, semi-lethal and sterile mutants were carried out.

[0301] We have carried out cytological screens of the lines that comprise late larval lethals, pupal lethals, pharate and adult semi-lethals and steriles for defective mitosis in the developing larval CNS. This has identified 20 complementation groups that affect all stages of the mitotic cycle. The cytological screens involve examining orcein-stained squashed preparations of the larval CNS to detect abnormal mitotic cells. In lines where defects are identified, the larval CNS is subjected to immunostaining to identify centromeres, spindle microtubules and DNA for further examination. This leads to clarification of the mitotic defect.

[0302] As a set of common functions are essential to both mitosis and meiosis, we then identify mutations resulting in sterility and failed progression through male meiosis. This involves examining squashed preparations larval, pupal or adult testes by phase contrast microscopy. We examine “onion stage” spermatids in the 24 pupal and pharate lethal lines and adult “semi-lethal” and viable lines for variations in size and number of nuclei which provides an indication of whether there have been defects in either chromosome segregation or cytokinesis, respectively. A total of 8 lines show such defects.

[0303] Further phenotype information for each mutant described in the results section, as observed by phase contrast microscopy of dividing meiocytes, is provided in the “Phenotype” field.

[0304] We then examined the ovaries and eggs of females that when homozygous are either sterile or produce embryos that fail to develop. Dissected ovaries are examined by microscopy for defects in the mitotic divisions that lead to the formation of the 16 cell egg chambers, for defects in the endoreduplication of 15 nurse cell nucleic; for cytoskeletal defects in the development of the egg chamber; for defects in meiosis; and for mitotic defects in embryos derived from mutant mothers.

[0305] We examined 24 lines that show female sterility or maternal effect lethality when homozygous and identify 5 that display defects of the type described above. In the Examples 1 to 29 below, lines exhibiting mitotic and meiotic phenotypes are categorised generally into three categories:
[0306] Category 1: Female Sterile
[0307] Category 2: Male Sterile
[0308] Category 3: Mitotic (Neuroblast) Phenotypes

[0309] Category 1 phenotypes are exhibited by mutations in Examples 1, 2, 2A, 2B and 2C; while Category 2 phenotypes are exhibited by mutations in Examples 3 to 9 and 9A. Category 3 phenotypes are exhibited by mutations in Examples 10 to 29.

[0310] Plasmid Rescue of P-Elements from Mutant Drosophila Lines

[0311] Genomic DNA was isolated from adult flies by the method of Jowett et al., 1986. Inverse PCR is used to identify flanking chromosomal sequences. The position of the inserted P-element is indicated in the Examples.

[0312] Sequence Analysis of P Element Insertion Lines

[0313] The open reading frame(s) (ORF(s)) immediately adjacent to the insertion site are identified from the annotated total genome sequence of Drosophila with reference to the ‘GADFLY’ section of the ‘FLYBASE’ Drosophila genome database (database of the Berkeley Drosophila Genome Project). The site of P element insertion and the GenBank accession number of the genomic file which contains the insertion site are included in the results section.

[0314] Where the insertion site was within a gene or close to the 5′ end of a gene, disruption of this gene is likely to be responsible for the phenotype, and it is included in the results section under the field heading “Annotated Drosophila Genome Complete Genome Candidate”, as both an accession number and an amino acid sequence. Where the insertion site indicates that the P-element may be affecting expression of two diverging genes (on opposite strands of the DNA) both are included in the results section.

[0315] The Drosophila gene sequence is then used to identify a human homologue. Data on homologues is derived from the Blink (“BLAST Link”) facility provided by the NCBI (National Center for Biotechnology Information) database. Where homologues are not apparent, further searches are made against the NCBI database using BLASTX (which compares the nucleotide query sequence virtually translated in all 6 frames against an amino acid database) or TBLASTN (amino acid query sequence against a nucleotide database virtually translated in all 6 frames) or TBLASTX (nucleotide query sequence against nucleotide database, both virtually translated in all 6 frames). Human homologues are included in the results section under the heading “Human Homologue of Complete Genome Candidate”, as both an accession number and an amino acid.

[0316] Additional Sequence Analysis using the Annotated D. melanogaster Sequence (GadFly)

[0317] As indicated above, rescue sequences are also used to search the fully annotated version of the Drosophila genome (GadFly; Adams, et al., 2000, Science 287, 2185-2195), using GlyBLAST at the Berkeley Drosophila Genome Projects web site (http://www.fruitfly.org/annot/) to identify the genome segment (usually approximately 200-250 kb) containing the P-element insertion site. The graphic representation of the genomic fragment available at GadFly allows the identification of all real and theoretical genes which flank the site of insertion. Candidate genes where the P-element is either inserted within the gene or close to the 5! end of the gene are identified. In GadFly, the Drosophila genes are given the designation CG (Complete gene) and usually details of human homologues are also given. Such human sequences may also be obtained using the fly sequences to screen databases using the BLAST series of programs. They may also be found by nucleic acid hybridisation techniques. In both cases homologies are defined using the parameters taught earlier in this patent. In most cases, this data confirms the data derived from the sequence analysis procedure described above, and in some cases new data is obtained. Where available both sets of data are included in the individual Examples described below.

[0318] Confirmation of Cell Cycle Involvement of Candidate Genes Using Double Stranded RNA Interference (RNAi)

[0319] P-elements usually insert into the region 5′ to a Drosophila gene. This means that there is sometimes more than one candidate gene affected, as the P-element can insert into the 5′ regions of two diverging genes (one on each DNA strand). In order to confirm which of the candidate genes is responsible for the cell cycle phenotype observed in the fly line, we use the technique of double stranded RNA interference to specifically knock out gene expression in Drosophila cells in tissue culture (Clemens, et al., 2000, Proc. Natl. Acad. Sci. USA, 6499-6503). The overall strategy is to prepare double stranded RNA (dsRNA) specific to each gene of interest and to transfect this into Schneider's Drosophila line 2 (Dme1-2) to inhibit the expression of the particular gene. The dsRNA is prepared from a double stranded, gene specific PCR product with a T7 RNA polymerase binding site at each end. The PCR primers consist of 25-30 bases of gene specific sequence fused to a T7 polymerase binding site (TAATACGACTCACTATAGGGACA) (SEQ ID NO:2), and are designed to amplify a DNA fragment of around 500 bp. Although this is the optimal size, the sequences in fact range from 450 bp to 650 bp. Where possible, PCR amplification is performed using genomic DNA purified from Schneider's Drosophila line 2 (Dme1-2) as a template. This is only feasible where the gene has an exon of 450 bp or more. In instances where the gene possesses only short exons of less than 450 bp, primers are designed in different exons and PCR amplification is performed using cDNA derived from Schneider's Drosophila line 2 (Dme1-2) as a template.

[0320] A sample of PCR product is analysed by horizontal gel electrophoresis and the DNA purified using a Qiagen QiaQuick PCR purification kit. 1 μg of DNA is used as the template in the preparation of gene specific single stranded RNA using the Ambion T7 Megascript kit. Single stranded RNA is produced from both strands of the template and is purified and immediately annealed by heating to 90 degrees C. for 15 mins followed by gradual cooling to room temperature overnight. A sample of the dsRNA is analysed by horizontal gel electrophoresis.

[0321] 3 μg of dsRNA is transfected into Schneider's Drosophila line 2 (Dme1-2) using the transfection agent, Transfect (Gibco) and the cells incubated for 72 hours prior to fixation. The DNA content of the cells is analysed by staining with propidium iodide and standard FACS analysis for DNA content. The cells in G1 and G2/S phases of the cell cycle are visualised as two separate population peaks in normal cycling S2 cells. In each experiment, Red Fluorescent Protein dsRNA is used as a negative control.

[0322] Preparation of dsRNA

[0323] RNA is prepared using an Ambion T7 Megascript kit in the following reaction: μl 10×T7 reaction buffer, 2 μl 75 mM ATP, 2 μl 75 mM GTP, 2 μl 75 mM UTP, 2 μl 75 mM CTP, 2 μl T7 RNA polymerase enzyme mix, 8 μl purified PCR product

[0324] Incubate at 37° C. for 6 hours. For convenience this can be done overnight in a PCR machine, such that the reaction is due to finish the next day e.g. 10 hrs 4° C., 6 hrs 37° C., 4° C. œ (prog. LISA6)

[0325] To degrade the DNA, add 1 ml DNase I (2 U/ml) and incubate at 37° C. for 15 mins.

[0326] Add 115 μl DEPC-treated water and 15 μl ammonium acetate stop solution (5M ammonium acetate, 100 mM EDTA)

[0327] Extract with an equal volume of phenol/chloroform, an equal volume of chloroform and then precipitate the RNA by adding 1 volume of isopropanol. Chill at −20° C. for 15-30 mins, then spin at top speed in a microfuge at 4° C. Remove the supernatant avoiding the RNA pellet, which appears as a clear, jelly-like pellet at the base of the tube. Dry briefly then dissolve the RNA in 20-100 μl DEPC-treated water, depending on the size of the pellet.

[0328] At this stage there are 2 complimentary single stranded RNAs. To anneal these, incubate the tube at 90° C. for 10 mins, then cool slowly, by transferring to a hot block at 37° C. and then setting the thermostat to room temperature.

[0329] Once the hot block has reduced to room temperature, spin down the liquid to the bottom of the tube and run 1 μl on a 1% agarose TBE horizontal gel to check the RNA yield and size.

[0330] Transfection of Schneider Line 2 (Dme1-2) Cells with dsRNA (Adherent Protocol)

[0331] Transfect 3 μg dsRNA into Schneider line 2 (Dme1-2) cells using Promega Transfast transfectjon reagent.

[0332] Schneider line 2 (Dme1-2) cells are grown in Schneider's medium 30 10% FCS+penicillin/Streptomycin, at 25° C. For the purpose of transfection with dsRNA, 25 ml of a healthy growing culture should be sufficient for 24-30 transfections. Knock off cells adhering to the bottom of the flask by banging it sharply against the side of the bench, then aliquot 1 ml into each well of 5 six-well plates. Add an additional 2 ml Schneider's medium+10% FCS+penicillin/Streptomycin to each well and incubate the plates overnight in a humid chamber at 25° C.

[0333] Vortex the Transfast, then add 9 μl to a sterile eppendorf containing the 3 μg dsRNA. Add 1 ml Schneider's medium (no additives), vortex immediately and incubate at room temperature for 15 mins. In the mean time, carefully remove the Schneider's medium from the six-well plates and replace with Schneider's medium (no additives); ˜1 ml/well.

[0334] Once the dsRNA+Transfast has finished its 15 min incubation, remove the medium from the cells in the six-well plates, replace with the 1 ml dsRNA/Transfast/Schneider's medium and incubate at 25° C. for 1 hr in a humid chamber.

[0335] Add 2 ml Schneider's medium containing 10%FCS+pen/strep and return to humid chamber in 25° C. incubator for 24-72 hrs.

[0336] Initially, observations of the affects of dsRNA transfection on the Schneider line 2 cell cycle are made after 72 hrs incubation, but where a significant phenotype is observed, additional transfections are performed and observations made at earlier time points.

[0337] For each experiment, transfection with RFP dsRNA is used as a negative control. Cells which have been treated with transfast, but which have not been transfected with dsRNA are also included as a control. Transfection with polo or orbit dsRNA, shown in preliminary studies to have an observable affect on Schneider line 2 cell cycle, is used as a positive control in each experiment.

[0338] Immunostaining of DMEL-2 Cells for Microscopic Analysis

[0339] For microscopic analysis of DMEL-2 insect cell line, ˜4×106 cells (0.5×10⁶ cells for 3 day incubations) are grown on coverslips in the bottom of the wells of six-well plates

[0340] Following any required treatments, the media is carefully removed and replaced with 1 ml PHEMgSO₄ fixation buffer (60 mM PIPES, 25 mM Hepes, 10 mM EGTA, 4 mM MgSO₄, pH to 6.8 with KOH)+3.7% formaldehyde. Until the cells are fixed they do not adhere strongly to the coverslip, so it is important to pipette gently at this stage.
[0341] The cells are left to fix for 20 mins, then the buffer replaced with PBS+0.1% Triton X-100 for 2 mins to permeablise the cells.
[0342] Cells are then blocked using PBS+0.1% Triton X-100+1% BSA (freshly prepared) and incubated for 1 hr at RT.
[0343] Next cells are incubated with the primary rat α-tubulin antibody YL1/2 (1:300 dil.) (+ any other primary antibodies to be used, ex: gamma-tub at 1/500) in PBS+0.1% Triton X-100+1% BSA 2-3 hrs at RT or alternatively overnight at 4° C.
[0344] Wash the cells 3 times for 5 mins in PBS +0.1% Triton X-100 and then incubate with the secondary antibody, TRITC-donkey anti-rat (1:500 dil.) (+ any other secondary antibodies to be used) in PBS+0.1% Triton X-100+1% BSA, at room temperature for 1 hr.
[0345] Wash the cells 3 times for 5 mins in PBS+0.1% Triton X-100 and once in PBS alone, then mount on a slide on a drop of N-propyl gallate mounting medium containing DAPI to stain the DNA and seal with nail varnish
[0346] View using fluorescent microscopy.

[0347] Primary antibodies: anti α-tub, 1:300 (rat YL1/2; SEROTEC); anti γ-tub, 1:500 (mouse; Sigma GTU-88)

[0348] Secondary antibodies: TRITC donkey anti-rat IgG at 1:300 (Jackson Immunoresearch, 712-026-150); AlexaFluor 488 goat anti-mouse, 1:300 (Molecular Probes; A-11001)

[0349] Transfections of S2 cells were carried out in 6 well tissue culture plates using 3 μg ds RNA per gene. The cells were harvested following three days for immunostaining.

[0350] Microscope Observations and Cellular Phenotyping

[0351] All studies were performed using a standard operating procedure. For every gene, each phenotypic test was performed following a 48 hours period of RNAi induction in duplicate and in two independent sets of experiments. The observations were carried out using a Zeiss Axioskop 2 motorized microscope with a 63×/1.4 plan-apochromat Zeiss objective.

[0352] Cells were fixed and stained with DAPI, alpha-tubulin and gamma-tubulin to visualise the nucleus/DNA, the microtubule network/spindle and the centrosomes respectively (see immunostaining section).

[0353] For each experiment, the number of normal looking mitotic cells in prophase/prometaphase, metaphase, anaphase and telophase is quantified as well as the abnormal looking ones in those various stages. These comprise abnormal chromosome number in prometaphase, misaligned chromosomes and lagging chromosomes in metaphase and anaphase respectively. Also, the abnormalities in the spindle morphology and the number of centrosomes are carefully noted. To get a more complete characterisation of the phenotype, the cell viability (cell confluency and number of apoptotic cells) is also assessed as well as the number of multinucleated interphase cells and the nucleus and cell morphology if different from control. If a phenotype appears to be more representative some images were stored for presentation of data.

[0354] FACS Analysis of Transfected Schneider Line 2 Cells

[0355] Following transfection and incubation for the desired length of time, then transfer the cells to a 15 ml centrifuge tube and pellet by spinning at 2000 rpm for 5 mins. Remove the supernatant, resuspend the cell pellet in 1 ml PBS and pellet a second time by spinning at 2000 rpm for 5 mins. Remove 900 μl of the PBS, resuspend the cells in the remaining PBS and then add 900 μl ethanol drop-wise while vortexing the tube. Transfer the cells to an eppendorf tube and store at −20° C.

[0356] On the day of analysis, pellet the cells by spinning in a microfuge for 5 mins at 2000 rpm, remove the supernatant, resuspend the cells in the residual ethanol and add 500 μl PBS. To remove clumps take the cells up through a 25 gauge needle and transfer to FACS tube. Add 3 μl 6 mg/ml Rnase A (Pharmacia) and 2.5 μl 25 mg/ml propidium iodide and incubate at 37° C. for 30 mins, then store on ice.

[0357] Analyse DNA content of the Schneider line 2 cells using FACSCalibur at Babraham Institute. Mutant phenotypes are determined by comparing profiles relative to cells transfected with RFP dsRNA.

[0358] Cellomics Mitotic Index HitKit Procedure

[0359] To Packard Viewplates containing pre-aliquoted dsRNA samples (1000 ng/well) add 35 μl of logarithmically growing D.Mel-2 cells diluted to 2.3×10⁵ cells/ml in fresh Drosophila-SFM/glutamine/Pen-Strep pre-warmed to 28° C.

[0360] Incubate the cells with the dsRNA (60 nM) in a humid chamber at 28° C. for 1 hr.

[0361] Add 100 μl Drosophila-SFM/glutamine/Pen-Strep pre-warmed to 28° C. and return the cells containing the dsRNA to the humid chamber at 28° C. for 72 hrs.

[0362] Gently remove the medium and slowly add 100 μl Fixation Solution (3.7% formaldehyde, 1.33 mM CaCl₂, 2.69 mM KCl, 1.47 mM KH₂PO₄, 0.52 mM MgCl₂-6H₂O, 137 nM NaCl, 8.50 mM Na₂HPO₄-7H₂O ) pre-warmed to 28° C. Incubate in the fume hood for 15 minutes. It is imperative to use care when manipulating cells before and during fixation.

[0363] Remove the Fixation Solution and wash with 100 μl Wash Buffer (1.33 mM CaCl₂, 2.69 mM KCI, 1.47 mM KH₂PO₄, 0.52 mM MgCl₂-6H₂O, 137 mM NaCl, 8.50 mM Na₂HPO₄-7H₂O).

[0364] Remove the Wash buffer, add 100 μl Permeabilisation Buffer (30.8 mM NaCl, 0.31 mM KH₂PO₄, 0.57 mM Na₂HPO₄-7H₂O, 0.02% Triton X-100), and incubate for 15 minutes.

[0365] Remove the Permeabilisation Buffer and wash with 100 μl Wash Buffer.

[0366] remove the Wash Buffer and add 50 μl of Staining Solution (1 μg/ml Hoechst 33258, 1.33 mM CaCl₂, 2.69 mM KCl, 1.47 mM KH₂PO₄, 0.52 mM MgCl₂-6H₂O, 137 mM NaCl, 8.50 Na₂HPO₄-7H₂O ) per well. Incubate for 1 hour protected from the light.

[0367] Remove the Staining Solution and wash twice with 100 μl Wash Buffer.

[0368] Remove the Wash Buffer and replace with 200 μL Wash Buffer containing 0.02% sodium azide.

[0369] Seal the plates and analyse the transfection efficiency using the ArrayScan HCS System, running the Application protocol Percent_Transfection_{—}200602_{—}10×_p2.0 with the 10× objective and the QuadBGRFR filter set.

TABLE 6
Results of Facs, Mitotic Index, and Cell phenotype assays after siRNA gene knockdown in Dmel-2 cells

| | | | |
|---|---|---|---|
| Example | Fly | Drosophila | RNA |

| | | | | |
|---|---|---|---|---|
| number | Line | gene | ID | RNAi primers |

| | | | | |
|---|---|---|---|---|
| 1 | 464 | CG15319 | 452 | TAATACGACTCACTATAGGGAGAACGGCACTTCTTTTTCTTGTCACCT (SEQ ID NO:3) |
| | | | 453 | TAATACGACTCACTATAGGGAGAATGATGAGCAGCTCCAGCAGTCTCT (SEQ ID NO:4) |
| 2 | 492 | CG2028 | 458 | TAATACGACTCACTATAGGGAGAGAAGCGGATCGTTTGGCGACATTTA (SEQ ID NO:5) |
| | | | 459 | TAATACGACTCACTATAGGGAGAAGATGGGCATTGATCGAGGCATAGC (SEQ ID NO:6) |
| 2A | ccr-a2 | CG3011 | 598 | TAATACGACTCACTATAGGGAGATGGCAACGAGTACATCGACCGCATA (SEQ ID NO:7) |
| | | | 599 | TAATACGACTCACTATAGGGAGATACCTTGTCTCCATTGGCCTTGGTG (SEQ ID NO:8) |
| 2B | ewv-b | CG2446 | 602 | TAATACGACTCACTATAGGGACACCCCAAGGCGATAGATACCACGATA (SEQ ID NO:9) |
| | | | 603 | TAATACGACTCACTATAGGGAGAATCTCTGGTATGGCCATCAGGCACT (SEQ ID NO:10) |
| 2C | Fs(1)06 | CG15309 | 608 | TAATACGACTCACTATAGGGAGAGGTGAAGACGTTTCAGGCCTATCTA (SEQ ID NO:11) |
| | | | 609 | TAATACGACTCACTATAGGGAGATCCCAGCCGTTCTCCTTGATCATGT (SEQ ID NO:12) |
| 3 | 167 | CG15305 | 462 | TAATACGACTCACTATAGGGAGATATGTGCATCCATTCGAAAGACTTT (SEQ ID NO:13) |
| | | | 463 | TAATACGACTCACTATAGCGAGAATAGGGGAGGTTGTTCTTAGATTGA (SEQ ID NO:14) |
| 4 | 224 | CG2096 | 468 | TAATACGACTCACTATAGGGAGATGAAACCATCCGAGAAGAAGGCCAA (SEQ ID NO:15) |
| | | | 469 | TAATACGACTCACTATAGGGAGACAGATAATCATCAAATGCAGGAATC (SEQ ID NO:16) |
| | | CG2222 | 464 | TAATACGACTCACTATAGGGAGAACGGAATGAACTATTTTCCGAACTATTACT (SEQ ID NO:17) |
| | | | 465 | TAATACGACTCACTATAGGAGAGATGTACTGACTGTTGGTGCGCACT (SEQ ID NO:18) |
| 5 | 231 | CG2941 | 470 | TAATACGACTCACTATAGGGAGAATCTGTAGACAGACGGCAGAATTGC (SEQ ID NO:19) |
| | | | 471 | TAATACGACTCACTATAGGGAGACGCAATAGCAGTACTTCCATCTTGT (SEQ ID NO:20) |
| | | CG2938 | 474 | TAATACGACTCACTATAGGGAGAATTGGATTGCGAATCGCTCAGGATC (SEQ ID NO:21) |
| | | | 475 | TAATACGACTCACTATAGGGAGATTTTCGCGAAGGACATCAATATCAG (SEQ ID NO:22) |
| 6 | 248 | CG6998 | 476 | TAATACGACTCACTATAGCGAGAGGCCTACATCAAGAAGGAGTTCGAC (SEQ ID NO:23) |
| | | | 477 | TAATACGACTCACTATAGGGAGATGGTTAGTTGTATTTGCGAATCTTC (SEQ ID NO:24) |
| 8 | ms(1)04 | CG1524 | 482 | TAATACGACTCACTATAGGGAGAGTTGCTGATCGACAAACAAACCCAG (SEQ ID NO:25) |
| | | | 483 | TAATACGACTCACTATAGGGAGACTTTCCAGATACTGCCATCTACAGA (SEQ ID NO:26) |
| | | CG10778 | 484 | TAATACGACTCACTATAGGGAGAGAGTGTCGCGTGTAGAGGCATTCTT (SEQ ID NO:27) |
| | | | 485 | TAATACGACTCACTATAGGGAGAAAGTACACATGGACGGAGCGGATAG (SEQ ID NO:28) |
| 9 | thb-a | CG1453 | 556 | TAATACGACTCACTATAGGGAGAGGCTGCCGTTTTTCCTTTTGTTATCC (SEQ ID NO:29) |
| | | | 557 | TAATACGACTCACTATAGGGAGATGATCCTTCCTCTTTGACTCCACCT GTT (SEQ ID NO:30) |
| | | CG18292 | 558 | TAATACGACTCACTATAGGGAGACGCTAAAAACTAGTAGTTTTGTGTGCCAGG (SEQ ID NO:31) |
| | | | 559 | TAATACGACTCACTATACGCAGAACCACCATTGCTGGAGCACATGTTG (SEQ ID NO:32) |
| 9A | ms(1)13 | CG5941 | 610 | TAATACGACTCACTATAGGGAGAGGATTAGCACCGTCGACCACGAAAA (SEQ ID NO:33) |
| | | | 611 | TAATACCACTCACTATAGGGAGAAATTTCCTGTGTGGATAACGTGAGGAGTCC (SEQ ID NO:34) |
| 10 | 187 | CG10701 | 490 | TAATACGACTCACTATAGGGAGACGTTCCTGCTGTTTGGCATTCTTCT (SEQ ID NO:35) |
| | | | 491 | TAATACGACTCACTATAGGGAGAACCACAATAAGACCACCCACACAGC (SEQ ID NO:36) |
| | | CG10648 | 488 | TAATACGACTCACTATACGCAGACACCTTCTGCCGCCATGAGTACAAT (SEQ ID NO:37) |
| | | | 489 | TAATACGACTCACTATAGGGAGATTCCGCCTCCAGAGCCTTGTTGAAA (SEQ ID NO:38) |
| 11 | 226 | CG2865 | 492 | TAATACGACTCACTATACCGAGATCAAGGCGTCCATGATCACCTCGAAAT (SEQ ID NO:39) |
| | | | 493 | TAATACGACTCACTATAGGGAGAACCTGTCCAGCTGCAACTTGGTCAA (SEQ ID NO:40) |
| | | CG2854 | 494 | TAATACGACTCACTATAGGGAGAGGAGATGGAAAAGGAGCTCGGAAAA (SEQ ID NO:41) |
| | | | 495 | TAATACCACTCACTATAGGCAGATCTCAATCCGTATGCCAAGGAGCAC (SEQ ID NO:42) |
| | | CG2845 | 496 | TAATACGACTCACTATAGGGAGAAGTTGACCTCCAAGCTCCACGAACT (SEQ ID NO:43) |
| | | | 497 | TAATACGACTCACTATAGGGAGACTGGTGCTTGATGTGTGTCCTAATG (SEQ ID NO:44) |
| 12 | 269 | CG1696 | 500 | TAATACGACTCACTATAGGGAGACACTTGGCGATTGAACATGAAACAA (SEQ ID NO:45) |
| | | | 501 | TAATACGACTCACTATAGGGAGAATATAAAAAGCCCCCAAAAGAATTG (SEQ ID NO:46) |
| | | CG1486 | 502 | TAATACGACTCACTATAGGGAGAATTGCACTTTGATTGCAGTCGATTGCG (SEQ ID NO:47) |
| | | | 503 | TAATACGACTCACTATAGCGAGAGATGTGGAATGGTGTGACCGTAGTG (SEQ ID NO:48) |
| 13 | 291 | CG10798 | 504 | TAATACGACTCACTATAGGGAGAGACAGGCATATAACTCAGGAACTTA (SEQ ID NO:49) |
| | | | 505 | TAATACGACTCACTATAGGGAGACTTGATGATCACCGGCATGTTCTCG (SEQ ID NO:50) |
| 15 | 379 | CG10964 | 552 | TAATACGACTCACTATAGGGAGACGGAGTGCCGTCGTAGTTGACAAAA (SEQ ID NO:51) |
| | | | 553 | TAATACGACTCACTATAGGGAGATGACCAAGGACCAAGGCCTCAATGT (SEQ ID NO:52) |
| | | CG2151 | 554 | TAATACGACTCACTATAGGGAGAAGCCCACTGTGATGGTGCGTTCTAT (SEQ ID NO:53) |
| | | | 555 | TAATACGACTCACTATAGGGAGAATCTCATCGGCTCCGAACTGCTTGA (SEQ ID NO:54) |
| 17 | 121 | CG10988 | 560 | TAATACGACTCACTATAGUCAGACATTTAAGCAAAATGATTGCCGCCAATAGT (SEQ ID NO:55) |
| | | | 561 | TAATACCACTCACTATAGGGAGATCTCAATCCGATGCTGGACTGTGTG (SEQ ID NO:56) |
| 18 | 237 | CG1558 | 562 | TAATACGACTCACTATAGGGAGAGCCCAGAAGGAGCAGCAAAAGTTCT (SEQ ID NO:57) |
| | | | 563 | TAATACGACTCACTATAGGGAGATAAGTTACCTGCATCGAGGCATTGT (SEQ ID NO:58) |
| | | CG11697 | 564 | TAATACGACTCACTATAGGGAGAATGATTTATGCGATCGTGATACACA (SEQ ID NO:59) |
| | | | 565 | TAATACGACTCACTATAGGGAGACCGCTTCTCTTCCAACTGCCTTTTG (SEQ ID NO:60) |
| 19 | 171 | CG3954 | 566 | TAATACGACTCACTATAGGGAGAGGAGCCGAGTACATCAATGCCAACT (SEQ ID NO:61) |
| | | | 567 | TAATACGACTCACTATACCUAGAATGTAGGTCTTAAACATCTCGCGCT (SEQ ID NO:62) |
| | | CG16903 | 568 | TAATACGACTCACTATAGGGAGAGGAAATCTCGCCCATGGTGCTAGAT (SEQ ID NO:63) |
| | | | 569 | TAATACGACTCACTATAGGAGATGTTCCGATCCACGGTGATTACAGC (SEQ ID NO:64) |
| 20 | 500 | CG4399 | 570 | TAATACGACTCACTATAGGGAGATGCCCCCCTGGATGATAATGCCAAT (SEQ ID NO:65) |
| | | | 571 | TAATACGACTCACTATAGGCAGAACTTGCAGCTCGTGACTCTGATGCT (SEQ ID NO:66) |
| | | CG4406 | 572 | TAATACGACTCACTATAGGGAGAATGCTTGTTAAATTTGTTGTCATCTTTGCC (SEQ ID NO:67) |
| | | | 573 | TAATACGACTCACTATAGGCAGAATCTCCTCCGAGTCCTGGAACTTGA (SEQ ID NO:68) |
| 23 | 37 | CG16983 | 580 | TAATACGACTCACTATAGGGAGAATGCCCAGCATCAAGTTGCAATCTT (SEQ ID NO:69) |
| | | | 581 | TAATACGACTCACTATAGGGAGACGAAATGCCGCGCTTTACTTCTCCT (SEQ ID NO:70) |
| | | CG13363 | 582 | TAATACGACTCACTATAGGGAGATCCGATACCTGCGCGTCTTTGACAA (SEQ ID NO:71) |
| | | | 583 | TAATACGACTCACTATAGGGAGAGCCATTATTACCAGGTCCACTGCTG (SEQ ID NO:72) |
| 24 | 186 | CG18319 | 584 | TAATACGACTCACTATAGGGAGACTCAACGAGAAGGTCCAGACTCAAC (SEQ ID NO:73) |
| | | | 585 | TAATACGACTCACTATAGGGAGATCGACGGCATATTTCTGGGTCCACT (SEQ ID NO:74) |
| 25 | 301 | CG14813 | 586 | TAATACGACTCACTATAGGGAGAAATGTGCAGCCTTCGGTGGCGGAGTACGAC (SEQ ID NO:75) |
| | | | 587 | TAATACGACTCACTATAGGCAGACAATTACTCGCTCTGAGAAGCTGTC (SEQ ID NO:76) |
| 26 | 148 | CG8655 | 590 | TAATACGACTCACTATAGGUAGAATGCCCTTCATGGCACATGACCGAT (SEQ ID NO:77) |
| | | | 591 | TAATACGACTCACTATAGGGAGATTGCTGCTCTTGCTGCACTAGCTGT (SEQ ID NO:78) |
| 27 | 335 | CG2621 | 594 | TAATACGACTCACTATAGGGAGAAATAATAATAACAACGTTATAAGCCAGCCG (SEQ ID NO:79) |
| | | | 595 | TAATACGACTCACTATAGGGAGATAATGCGGCTGCGCAAGATGCTGTT (SEQ ID NO:80) |
| 28 | 342 | CG1725 | 528 | TAATACGACTCACTATAGOCAGAGCCACGTTGAAATCGATCACCGACA (SEQ ID NO:81) |
| | | CT4934 | 529 | TAATACGACTCACTATAGGGAGAATAGAAGGAGTTGGCGGGTGGAGAT (SEQ ID NO:82) |
| | | CT41310 | 530 | TAATACGACTCACTATAGGGAGATCTCTTTCGATTTCTTCTCTTCTGT (SEQ ID NO:83) |
| | | | 531 | TAATACGACTCACTATAGGGAGATTGATGAACACGGCGACGGGATACA (SEQ ID NO:84) |
| | | CG1594 | 532 | TAATACGACTCACTATAGOGAGAAGGGAATCGTGTGGAAAGACTCGCA (SEQ ID NO:85) |
| | | | 533 | TAATACGACTCACTATAGGGAGAACAAGGACAAATCAACGGGACTGGC (SEQ ID NO:86) |
| 29 | 419 | CG12638 | 596 | TAATACGACTCACTATAGUGAGATGTTTGCCATATCATTGCAGCTGCT (SEQ ID NO:87) |
| | | | 597 | TAATACGACTCACTATAGCGAGAGATGTCATATTGGCCAGGTCACTGG (SEQ ID NO:88) |

RNAi phenotype

Mitotic
Index
(% of

| | | |
|---|---|---|
| Example | RFP | Human |

| | | | | |
|---|---|---|---|---|
| number | Facs | control) | Microscopy | homologue |

| | | | | |
|---|---|---|---|---|
| 1 | Fewer G1 | wt | wt | AAC51331- |
| | cells, with | | | CREB-binding |
| | correspond- | | | protein |
| | ing increase | | | |
| | in G2/M | | | |
| 2 | Fewer cells | | 20% increase in | P48729 Casein |
| | in G2/M, | | chromosomal defects. | kinase I, alpha |
| | with a | | Some bright spots scattered | isoform |
| | correspond- | | in the cytoplasm in the | |
| | ing increase | | DAPI channel, most of the | |
| | in sub-G1 | | nuclei are irregularly | |
| | events | | shaped, MI decreases, and | |
| | | | DNA appears | |
| | | | hypocondensed Shape of | |
| | | | the cells is also very | |
| | | | affected. | |
| 2A | wt | 91% | 12% increase in | AAA63258- |
| | | | chromosomal defects | serine |
| | | | Multipolar and tripolar | hydroxymethyl- |
| | | | spindles | transferase |
| 2B | wt | 74% | wt | none |
| 2C | wt | 111% | 20% increase in | AAL09354 |
| | | | chromosomal defects | DiGeorge |
| | | | spindle defects, | syndrome-related |
| | | | some bipolar spindle | protein FKSG4 |
| 3 | Very slightly | wt | 20% increase in | None |
| | fewer | | chromosomal defects | |
| | cycling cells | | Difficult to see a normal | |
| | & a corre- | | spindle | |
| | sponding | | | |
| | increase in | | | |
| | sub-G1 cells | | | |
| 4 | wt | wt | 20% increase in | NP_002700 |
| | | | chromosomal defects, no | protein |
| | | | defects in centrosomes or | phosphatase I |
| | | | spindle | |
| | wt | Not done | 40% increase in | NP_073607 |
| | | | chromosomal defects | hypothetical |
| | | | Multipolar and monopolar | protein |
| | | | spindles | FLJ13912 |
| | | | Many polyploid cells | |
| | | | Some hyper-condensed | |
| | | | chromosomes | |
| 5 | Fewer cells | wt | wt | None |
| | in G2/M, | | | |
| | with a | | | |
| | correspond- | | | |
| | ing increase | | | |
| | in sub-G1 | | | |
| | events | | | |
| | wt | wt | 10% increase in | NP_075051 Cas1 |
| | | | chromosomal defects | O- |
| | | | Fewer cells indicating cell | acetyltransferase |
| | | | death | |
| | | | Multipolar spindles | |
| 6 | Very slightly | wt | wt | AAH10744 |
| | fewer cells in | | | Similar to |
| | G2/M & a | | | RIKEN cDNA |
| | correspond- | | | 6720463E02 |
| | ing increase | | | gene |
| | in sub-G1 | | | |
| | cells | | | |
| 8 | Fewer G2/M | 63% | Only 38 mitotic cells | A25220 |
| | events, with | | remained on the | ribosomal |
| | a corre- | | slide, cells are | protein S14 |
| | sponding | | very scattered and some | |
| | increase in | | are dying. Nuclei are | |
| | sub-G1 | | degraded. | |
| | events and a | | | |
| | different G1 | | | |
| | profile | | | |
| | wt | 78% | 20% increase in | hypothetical |
| | | | chromosomal defects | protein |
| | | | High number of multipolar | FLJ13102 |
| | | | spindles | (54%) Similarity |
| | | | | to Mouse |
| | | | | kinesin-like |
| | | | | protein KIF4 |
| 9 | Slight | wt | wt | (CG1453)- |
| | increase in | | | CAA69621- |
| | G1 and sub- | | | kinesin-2 |
| | G1 cells, but | | | |
| | no obvious | | | |
| | correspond- | | | |
| | ing decrease | | | |
| | in S or G2/M | | | |
| | cells | | | |
| | wt | 91% | 20% increase in | BAA22937- |
| | | | chromosomal defects | cdk2- |
| | | | Possible decrease in mitotic | associated |
| | | | index | protein 1; |
| | | | Some multipolar spindles, | cdk2ap1, |
| | | | few normal looking spindles | deleted in oral |
| | | | | cancer 1 |
| 9A | Very slight | wt | wt | MCT-1 (multiple |
| | decrease in | | | copies in a T-cell |
| | G1 peak, but | | | malignancies) |
| | no other | | | (BAA86055), |
| | obvious | | | |
| | variation | | | |
| | from wt | | | |
| | profile | | | |
| 10 | Fewer G2/M | wt | 20% increase in | A41289 human |
| | events with a | | chromosomal defects, | moesin |
| | correspond- | | misaligned chromosome | |
| | ing increase | | (40%), spindle with free | |
| | in sub-G1 | | extracentrosome, cells with | |
| | events | | more than one spindle. | |
| | wt | wt | Proportion of mitotic | NP_115898 |
| | | | chromosomal defects a bit | Mak16-like RNA |
| | | | lower than normal, high | binding protein |
| | | | proportion of monopolar | |
| | | | spindles and small spindles. | |
| | | | Very high proportion of | |
| | | | prometaphase cells | |
| | | | Cell death | |
| 11 | Fewer cells | wt | wt | none |
| | in G2/M and | | | |
| | also S. | | | |
| | Increased | | | |
| | percentage | | | |
| | of cells in | | | |
| | sub-G1 and | | | |
| | G1 | | | |
| | wt | wt | 17% increase in | CAD38627 |
| | | | chromosomal defects | hypothetical |
| | | | Higher level of polyploid, | protein |
| | | | prometaphase cells and | |
| | | | misaligned chromosomes, | |
| | | | anaphase normal | |
| | wt | wt | More than 20% increase in | AAA35609 B- |
| | | | chromosomal defects | raf protein |
| | | | More multipolar spindles | |
| 12 | Fewer cells | wt | wt | NP_056158 |
| | in G2/M and | | | hypothetical |
| | also S. | | | protein |
| | Increased | | | |
| | percentage | | | |
| | of cells in | | | |
| | sub-G1 and | | | |
| | G1 | | | |
| | wt | wt | 10% increase in | BAA19780 |
| | | | chromosomal defects | Similar to a |
| | | | More prometaphase cells | C. elegans protein |
| | | | | in cosmid |
| | | | | C14H10 |
| 13 | Fewer cells | wt | wt | CAA23831 c- |
| | in G2/M. | | | myc oncogene |
| | Increased | | | |
| | percentage | | | |
| | of cells in | | | |
| | sub-G1 and | | | |
| | G1 | | | |
| 15 | wt | wt | 15% increase in | AAC50725 11- |
| | | | chromosomal defects | cis retinol |
| | | | high number of disorganised | dehydrogenase |
| | | | spindles | |
| | wt | 81% | 20% increase in | XP_033135 |
| | | | chromosomal defects | thioredoxin |
| | | | High proportion of | reductase beta |
| | | | polyploid cells | |
| 17 | wt | wt | 22% increase of | AAC39727- |
| | | | chromosomal defects | spindle pole |
| | | | Main feature is a high | body protein |
| | | | proportion of metaphase | spc98 homolog |
| | | | figures with misaligned | GCP3 |
| | | | chromosomes (75% vs 20% | |
| | | | in normal cells) Some cells | |
| | | | without any centrosomes | |
| 18 | wt | 117% | 18% increase in | none |
| | | | chromosomal defects | |
| | | | Abnormal spindle structures | |
| | | | (increased number of | |
| | | | centrosomes) | |
| | Fewer G2/M | wt | 18% increase in | BAB14444 |
| | events, with | | chromosomal defects | unamed protein- |
| | a corre- | | More polyploid cells | similar to a |
| | sponding | | | hypothetical |
| | increase in | | | protein in the |
| | sub-G1 | | | region deleted in |
| | events. Also | | | human familial |
| | a different | | | adenomatous |
| | G1 profile | | | polyposis 1 |
| | from wt. | | | |
| 19 | Very slight | 45% | 20% increase in | AAH08692- |
| | increase in | | chromosomal defects | protein tyrosine |
| | G1 and sub- | | Spindle and centrosome | phosphatase, |
| | G1 cells, but | | seem normal. | non-receptor |
| | no obvious | | Higher level of aneuploidy | type 11 |
| | correspond- | | and polyploidy | |
| | ing decrease | | | |
| | in S or G2/M | | | |
| | cells | | | |
| | wt | wt | 20% increase in | AAD53184- |
| | | | chromosomal defects | cyclin L ania-6a |
| | | | Clear decrease in mitotic | |
| | | | index | |
| | | | A lot of spindles seem to be | |
| | | | affected in their structure, | |
| | | | poles not well defined and | |
| | | | microtubule array irregular | |
| | | | Many cells with fused | |
| | | | interphase or decondensed | |
| | | | nuclei | |
| 20 | Fewer cells | 88% | wt | AAF13722- |
| | in G2/M, | | | neurofilament |
| | with a | | | protein |
| | correspond- | | | |
| | ing increase in | | | |
| | sub-G1 | | | |
| | events. Also | | | |
| | a different | | | |
| | G1 profile | | | |
| | from wt. | | | |
| | Slight | wt | wt | XP_131206 |
| | decrease in | | | similar to GPI- |
| | G2/M and | | | anchor |
| | correspond- | | | transamidase |
| | ing slight | | | |
| | increase in | | | |
| | sub-G1 cells. | | | |
| 23 | Significant | wt | 30% increase in | XP_054159- |
| | decrease in | | chromosomal defects | hypothetical |
| | sub-G1 & | | All types of spindle and | protein |
| | G1 peaks, | | chromosomal defects are | |
| | with a | | visible but no obvious main | |
| | correspond- | | one | |
| | ing increase | | Higher proportion of | |
| | in the G2/M | | aneuploid and polyploid | |
| | peak, indica- | | cells | |
| | ting mitotic | | Possible decrease in mitotic | |
| | arrest. | | index | |
| | | | Cells with excess | |
| | | | centrosomes | |
| | wt | wt | 40% increase in | NP_057112 |
| | | | chromosomal defects | CGI-85 protein |
| | | | A lot of polyploid cells, | |
| | | | multicentrosome but some | |
| | | | normal spindle also | |
| 24 | Significant | 91% | 30% increase in | BAA11675- |
| | decrease in | | chromosomal defects | ubiquitin- |
| | sub-G1 & | | Various chromosomal | conjugating |
| | G1 peaks, | | defects ranging from | enzyme E2 |
| | but no | | number of centrosomes, | UbcH-ben |
| | correspond- | | spindle structure and | |
| | ing increase | | stretched/lagging chromatids | |
| | in the G2/M | | High number of abnormal | |
| | peak. | | anaphases 75% of anaphases | |
| | Probably | | (compared to 10-15% in | |
| | indicates | | normal cells) | |
| | mitotic | | | |
| | arrest. | | | |
| 25 | Fewer G1 | 81% | Cell death | CAA57071- |
| | events, with | | Lower proportion of | archain |
| | an increased | | chromosomal defects | |
| | number of | | | |
| | cells in | | | |
| | G2/M | | | |
| | indicating | | | |
| | mitotic arrest | | | |
| 26 | very slight | wt | 40% increase in | AAB97512- |
| | decrease in | | chromosomal defects | HsCdc7 |
| | G1 and | | Some chromosomal defects | |
| | G2/M peaks, | | in spindle structure but no | |
| | but no | | clear single phenotype | |
| | significant | | | |
| | increase in | | | |
| | sub-G1 cells | | | |
| | or polypoid | | | |
| | cells. | | | |
| 27 | wt | wt | 20% increase in | NP_002084- |
| | | | chromosomal defects | glycogen |
| | | | Many obvious mitotic | synthase kinase 3 |
| | | | chromosomal defects and | beta |
| | | | too many centrosomes per | |
| | | | cell | |
| | | | Very difficult to find a | |
| | | | normal looking mitotic | |
| | | | spindle | |
| | | | Most of the anaphases are | |
| | | | abnormal with lagging | |
| | | | chromosomes | |
| 28 | Essentially | | No increase in chromosomal | XP_012060- |
| | wt profile. | | defects but many with more | discs, large |
| | Very slight | | than two centrosomes | (Drosophila) |
| | reduction in | | | homolog 2 |
| | G1 peak, but | | | |
| | no obvious | | | |
| | correspond- | | | |
| | ing increase | | | |
| | in other | | | |
| | peaks | | | |
| | Very slight | wt | 20% increase in | NP_004963 |
| | reduction in | | chromosomal defects | JAK-2 kinase |
| | G1 peak, | | Polyploid cells | (Janus kinase 2), |
| | with a | | Abnormal number of | involved in |
| | correspond- | | centrosomes in many cells | cytokine receptor |
| | ing increase | | but some normal bipolar | signaling |
| | in sub-G1 | | spindles | |
| | cells. | | | |
| 29 | Decrease in | 94% | wt | B38637-Ras |
| | the number | | | inhibitor (clone |
| | of cells in | | | JC265)-human |
| | G2/M, with | | | (fragment) |
| | an increase | | | |
| | in the sub- | | | |
| | G1 popula- | | | |
| | tion. The G1 | | | |
| | peak differs | | | |
| | in profile | | | |
| | from wt. | | | |

### Example Section B

### P-Element Screening Results

[0370] The layout of a typical entry in the results section is shown below. Not all fields present in the actual results section contain information for each individual Drosophila line described.

[0371] Results Layout (Examples 1 to 29)

[0372] Line ID ‘(Drosophila line designation)

[0373] Phenotype
[0374] (Description of Drosophila phenotype)

[0375] Annotated Drosophila genome genomic segment containing P element insertion site (and map position)
[0376] (Accession number, map position according to the Bridges map, Lefevre, 1976)

[0377] P element Insertion site
[0378] (Base pair position within genomic segment)

[0379] Annotated Drosophila Genome Complete Genome candidate
[0380] (Derived from GADFLY Berkley Drosophila Genome Project database, accession number, MRNA sequence (complete CDS) and Peptide sequence)

[0381] Human homologue of Complete Genome candidate
[0382] (Derived from Blink and BLAST searches, accession number, mRNA sequence (complete CDS) and peptide sequence)

[0383] Putative function
[0384] (Derived from homologies or Drosophila experimental data)
   A specific example is as follows (Example 5, Category 2):

[0386] Line ID—231

[0387] Phenotype—Semi-lethal male and female, cytokinesis defect. In some cysts, variable sized Nebenkerns

[0388] Annotated Drosophila genome genomic segment containing P element insertion site (and map position)—AE003429 (3F)

[0389] P element insertion site—153,730

[0390] Annotated Drosophila genome Complete Genome candidate

[0391] CG5014—vap-33-1 vesicle associated membrane protein

(SEQ ID NO:124)

CACATGACTAGCTGACAGAATATATGGCTTTTTTACATTTTGCGTTTTCA
ACTGAAGTTTGCGAAGAAAGCGAAGCGTGGTAAACGAGTGAAATCGAAAA
TATCGACAGAAAAGCGACCTAAAGTCGGTGAAGAAGTGGCACGTTGATCG
TTGTGTTTTTTTCCCGAAATTTTCTGCAAAAAGCCCGTGCGTGCGTGAGT
TTCTCTGGCTCTTGCTTTTTTTTTGTCCATGCGTGTGTGTGTGGTCGCAT
AAATTTACCGATATTTCGGGTGTGAGAGCGAAACGAACGAAAAACGAAAG
AAAAAAAGAGAGACGAGTAAAGTAAAACGAAACAGGCATAAAAACAGCAG
CAGTTTTCTTGATATATTTGGCTAAAAAAGGCAAACCAAACAGCCAGCAA
GAACAACAAATAGCTGGGCAAAAACAGGACGCAGAAAAAATAAAATTAAA
ACGATAAGAGGCGAAAAGCGGAGAGAGTGAAATTCTCGGCAGCAACAACG
ACAAGAACAAGACCAGGAGCAGCAGCAACAACAACAACAAAAGCCAGCCG
CCACAATGAGCAAATCACTCTTTGATCTTCCGTTGACCATFGAACCAGAA
CATGAGTTGCGTTTTGTGGGTCCCTTCACCCGACCCGTTGTCACAATCAT
GACTCTGCGCAACAACTCGGCTCTGCCTCTGGTCTTCAAGATCAAGACAA
CCGCCCCGAAACGCTACTGCGTACGTCCAAACATCGGCAAGATAATTCCC
TTTCGATCAACCCAGGTGGAGATCTGCCTTCAGCCATTCGTCTACGATCA
GCAGGAGAAGAACAAGCACAAGTTCATGGTGCAGAGCGTCCTGGCACCCA
TGGATGGTGATCTAAGCGATTTAAATAAATTGTGGAAGGATCTGGAGCCC
GAGCAGCTGATGGACGCCAAACTGAAGTGCGTTTTCGAGATGCCCACCGG
TGAGGCAAATGCTGAGAACACCAGCGGTGGTGGTGCCGTTGGCGGCGGAA
CCGGAGCTGGCGGAGGCGGAAGCGCGGGTGCCAATACTAGCTGAGCCAGC
GCTGAGGCGCTCGAGAGCAAGCCGAAGCTCTCCAGCGAGGATAAGTTTAA
GCGATCCAATTTGCTCGAAACGTCTGAGAGTCTGGACTTGCTGTCCGGAG
AGATCAAAGCGCTGCGTGAATGCAACATTGAATTGCGAAGAGAGAATCTT
CAC1TGAAGGATCAAATCACACGTTTCCGGAGCTCGCCGGCCGTCAAACA
GGTGAATGAGCCCTATGCCCCAGTCCTGGCTGAGAAGCAGATTCCGGTCT
TTTACATTGCAGTTGCCATTGCTGCGGCCATCGTTAGCGTGCTGCTGGGC
AAATTCTITCTCTGA

(SEQ ID NO:125)

MSKSLFDLPLTIEPEHELRFVGPFTRPVVTIMTLRINNSALPLVFKIKTTA
PKRYCVRPNIGKIIPFRSTQVEICLQPFVYDQQEKNKHKFMVQSVLAPMD
ADLSDLNKLWKDLEPEQLMDAKLKCVFEMPTAEANAENTSGGGAVGGGTG
AAGGGSAGANTSSASAEALESKPKLSSEDKFKPSNLLETSESLDLLSGEI
KALRECNIELRRENLHLKDQITRFRSSPAVKQVNEPYAPVLAEKQIPVFY
IAVAIAAAIVSLLLGKFFL

[0392] Human homologue of Complete Genome candidate

[0393] AAD13577 VAMP-associated protein B

| | | |
|---|---|---|
| 1 | gcgcgcccac ccggtagagg acccccgccc gtgccccgac cggtccccgc ctttttgtaa | (SEQ ID NO:126) |
| 61 | aacttaaagc gggcgcagca ttaacgcttc ccgccccggt gacctctcag gggtctcccc | |
| 121 | gccaaaggtg ctccgccgct aaggaacatg gcgaaggtgg agcaggtcct gagcctcgag | |
| 181 | ccgcagcacg agctcaaatt ccgaggtccc ttcaccgatg ttgtcaccac caacctaaag | |
| 241 | cttggcaacc cgacagaccg aaatgtgtgt tttaaggtga agactacagc accacgtagg | |
| 301 | tactgtgtga ggcccaacag cggaatcatc gatgcagggg cctcaattaa tgtatctgtg | |
| 361 | atgttacagc ctttcgatta tgatcccaat gagaaaagta aacacaagtt tatggttcag | |
| 421 | tctatgtttg ctccaactga cacttcagat atggaagcag tatggaagga ggcaaaaccg | |
| 481 | gaagacctta tggattcaaa acttagatgt gtgtttgaat tgccagcaga gaatgataaa | |
| 541 | ccacatgatg tagaaataaa taaaattata tccacaactg catcaaagac agaaacacca | |
| 601 | atagtgtcta agtctctgag ttcttctttg gatgacaccg aagttaagaa ggttatggaa | |
| 661 | gaatgtaaga ggctgcaagg tgaagttcag aggctacggg aggagaacaa gcagttcaag | |
| 721 | gaagaagatg gactgcggat gaggaagaca gtgcagagca acagccccat ttcagcatta | |
| 781 | gccccaactg ggaaggaaga aggccttagc acccggctct tggctctggt ggttttgttc | |
| 841 | tttatcgttg gtgtaattat tgggaagatt gccttgtaga ggtagcatgc acaggatggt | |
| 901 | aaattggatt ggtggatcca ccatatcatg ggatttaaat ttatcataac catgtgtaaa | |
| 961 | aagaaattaa tgtatgatga catctcacag gtcttgcctt taaattaccc ctccctgcac | |
| 1021 | acacatacac agatacacac acacaaatat aatgtaacga tcttttagaa agttaaaaat | |
| 1081 | gtatagtaac tgattgaggg ggaaaagaat gatctttatt aatgacaagg gaaaccatga | |
| 1141 | gtaatgccac aatggcatat tgtaaatgtc attttaaaca ttggtaggcc ttggtacatg | |
| 1201 | atgctggatt acctctctta aaatgacacc cttcctcgcc tgttggtgct ggcccttggg | |
| 1261 | gagctggagc ccagcatgct ggggagtgcg gtcagctcca cacagtagtc cccacgtggc | |
| 1321 | ccactcccgg cccaggctgc tttccgtgtc ttcagttctg tccaagccat cagctccttg | |
| 1381 | ggactgatga acagagtcag aagcccaaag gaattgcact gtggcagcat cagacgtact | |
| 1441 | cgtcataagt gagaggcgtg tgttgactga ttgacccagc gctttggaaa taaatggcag | |
| 1501 | tgctttgttc acttaaaggg accaagctaa atttgtattg gttcatgtag tgaagtcaaa | |
| 1561 | ctgttattca gagatgttta atgcatattt aacttattta atgtatttca tctcatgttt | |
| 1621 | tcttattgtc acaagagtac agttaatgct gcgtgctgct gaactctgtt gggtgaactg | |
| 1681 | gtattgctgc tggagggctg tgggctcctc tgtctctgga gagtctggtc atgtggaggt | |
| 1741 | ggggtttatt gggatgctgg agaagagctg ccaggaagtg ttttttctgg gtcagtaaat | |
| 1801 | aacaactgtc ataggcaggg aaattctcag tagtgacagt caactctagg ttaccttttt | |
| 1861 | taatgaagag tagtcagtct tctagattgt tcttatacca cctctcaacc attactcaca | |
| 1921 | cttccagcgc ccaggtccaa gtttgagcct gacctcccct tggggaccta gcctggagtc | |
| 1981 | aggacaaatg gatcgggctg caaagggtta gaagcgaggg caccagcagt tgtgggtggg | |
| 2041 | gagcaaggga agagagaaac tcttcagcga atccttctag tactagttga gagtttgact | |
| 2101 | gtgaattaat tttatgccat aaaagaccaa cccagttctg tttgactatg tagcatcttg | |
| 2161 | aaaagaaaaa ttataataaa gccccaaaat taaga | |
| 1 | makveqvlsl epqhelkfrg pftdvvttnl klgnptdrnv cfkvkttapr rycvrpnsgi | (SEQ ID NO:127) |
| 61 | idagasinvs vmlqpfdydp nekskhkfmv qsmfaptdts dmeavwkeak pedlmdsklr | |
| 121 | cvfelpaend kphdveinki isttasktet pivskslsss lddtevkkvm eeckrlqgev | |
| 181 | qrlreenkqf keedglrmrk tvqsnspisa laptgkeegl strllalvvl ffivgviigk | |
| 241 | ial | |

[0394] Putative function
[0395] Membrane associated protein which may be involved in priming synaptic vesicles

[0396] Results Layout for Examples 2A, 2B, 2C and 9A

[0397] The results layout for Examples 2A, 2B, 2C and 9A includes, in place of the fourth field “P Element Insertion Site”, a field “P Element Insertion Site Sequence”. This field shows the actual sequence of the insertion site which is determined experimentally, as opposed to the base pair position within genomic segment present in the other Examples.

### Category 1—Female Sterile

### Example 1

### Category 1

[0398] Line ID—464

[0399] Phenotype—Female semi-sterile, brown eggs laid

[0400] Annotated Drosophila genome genomic segment containing P element insertion site (and map position)—AE003448 (8F)

[0401] Pelement Insertion site—44,575

[0402] Annotated Drosophila genome Complete Genome candidate

[0403] CG1 5319—nejire (CREB binding protein, p300/CBP)

(SEQ ID NO:89)

CTTAACCAAACAAACAACCTGTGCAACAATTGTCAAAGTGCTAGGCGACA
AATAATTTCTGAAAGAAGATTTGACAAGTTCCAATAACGAAAATATCAGA
ACACACTCGAACTCCAACATAGACGGATCATTGGAGAGTTAGTGAAAAAA
AAAAGCGAAAAATCAGAAAAACTTTATAAACTAATAGAAACAATACTACT
CAGATTTTTCGAACGTTTTTCGTCTGCGTTTCTGTTTTTTTCCGAATCGA
AAGAATCAAACTAACTCTATATGATGGCCGATCACTTAGACGAACCGCCC
CAAAAGCGGGTTAAAATGGATCCAACGGATATCTCTTACTTTCTGGAGGA
GAACCTGCCCGATGAGCTGGTGTCCTCGAATAGTGGCTGGTCGGATCAGC
TGACCGGCGGAGCAGGCGGTGGCAATGGAGGTGGCGGCGCCTCCGGTGTA
ACCACAAATCCCACATCCGGCCCAAATCCCGGTGGCGGACCCAACAAGCC
GGCAGCCCAAGGACCCGGCTCTGGCACAGGCGGAGTCGGTGTTGGAGTGA
ATGTGGGTGTCGGCGGTGTTGTTGGCGTCGGCGTTGTGCCTTCCCAGATG
AACGGAGCCGGCGGCGGCAACGGATCCGGAACGGGTGGCGACGACGGCAG
TGGCAACGGCTCAGGAGCGGGCAACAGAATCAGTCAAATGCAACACCAGC
AACTGCAGCACCTACTCCAGCAGCAGCAGCAGGGCCAGAAGGGCGCCATG
GTGGTGCCCGGCATGCAGCAGCTGGGCAGCAAGTCGCCCAACCTGCAGTC
ACCCAACCAGGGCGGCATGCAGCAGGTGGTGGGCACTCAGATGGGTATGG
TCAACTCAATGCCCATGTCAATATCGAATAATGGCAACAATGGCATGAAC
GCCATACCAGGCATGAACACCATTGCGCAGGGCAATCTGGGAAACATGGT
GCTGACCAACAGCGTTGGCGGCGGCATGGGCGGCATGGTTAATCATCTTA
AGCAGCAGCCTGGCGGCGGCGGCGGTGGGATGATCAATTCCGTTTCAGTA
CCCGGAGGACCTGGAGCAGGAGCTGGTGGCGTTGGAGCTGGCGGCGGAGG
AGCCGTTGCCGCAAACCAAGGCATGCATATGCAGAACGGCCCAATGATGG
GACGCATGGTGGGGCAACAGCATATGCTTCGTGGCCCGCATCTCATGGGT
GCCTCTGGAGGAGCTGGTGGGCCAGGAAACGGGCCTGGTGGCGGAGGACC
ACGCATGCAGAATCCGAACATGCAAATGACTCAACTCAACAGTCTGCCCT
ACGGAGTGGGTCAGTATGGTGGCCCAGGCGGTGGTAACAATCCTCAGCAA
CAGCAGCAGCAACAGCAGCAACAACTTCTCGCCCAGCAGATGGCCCAAAG
AGGTGGCGTCGTACCGGGCATGCCGCAGGGTAATCGGCCCGTTGGCACAG
TGGTGCCCATGTCCACACTCGGCGGCGATGGATCAGGGCCCGCGGGGCAG
CTGGTAAGCGGGAATCCTCAGCAGCAGCAGATGCTGGCGCAGCAGCAAAC
CGGAGCCATGGGCCCGCGTCCTCCGCAACCAAACCAGCTGCTCGGTCATC
CCGGCCAGCAGCAGCAGCAGCAACAGCAGCCTGGCACCTCGCAGCAGCAG
CAACAGCAGCAGGGAGTCGGAATCGGAGGAGCAGGCGTTGTGGCCAATGC
AGGAACCGTGGCTGGCGTGCCGGCAGTGGCAGGCGGCGGAGCCGGTGGTG
CCGTACAATCTAGCGGCCCTGGTGGCGCCAATCGCGATGTGCCCGACGAC
CGTAAGCGACAGATCCAGCAGCAACTGATGCTGCTCCTCCATGCACACAA
ATGCAATCGCAGGGAGAACCTGAATCCGAACAGGGAAGTGTGCAACGTTA
ACTACTGCAAGGCGATGAAATCCGTGCTGGCCCACATGGGCACTTGCAAA
CAGAGCAAGGACTGCACCATGCAGCATTGTGCCTCTTCGCGCCAAATTCT
GTTGCATTATAAAACGTGCCAGAACAGTGGCTGCGTCATTTGCTATCCCT
TCCGGCAGAATCATTCGGTTTTTCAAAATGCGAATGTGCCGCCAGGAGGC
GGACCGGCAGGAATTGGAGGTGCGCCACCAGGTGGCGGCGGAGCGGGTGG
TGGAGCGGCTGGAGCAGGCGGTAATCTTCAGCAGCAACAGCAGCAGCAAC
AACAGCAGCAGCAGAACCAGCAGCCCAATCTGACGGGTCTGGTAGTGGAT
GGCAAGCAAGGACAGCAGGTTGCACCGGGAGGTGGCCAAAATACTGCCAT
AGTTCTTCCCCAGCAACAGGGAGCGGGCGGTGCACCGGGTGCGCCGAAAA
CGCCTGCGGATATGGTGCAACAATTGACCCAACAGCAGCAGCAGCAGCAA
CAGCAGGTTCACCAGCAACAGGTTCAGCAACAGGAACTCCGTCGATTCGA
TGGCATGAGCCAGCAAGTCGTAGCAGGTGGTATGCAACAGCAGCAGCAGC
AGGGTTTGCCTCCTGTGATTCGCATTCAAGGCGCTCAGCCGGCCGTCAGG
GTACTGGGACCAGGTGGTCCCGGCGGCCCAAGTGGACCAAATGTTCTGCC
GAACGATGTTAACAGCCTGCATCAACAACAGCAACAAATGCTGCAACAGC
AGCAGCAACAGGGCCAGAATCGACGACGCGGTGGCCTGGCCACCATGGTG
GAGCAACAACAGCAGCATCAGCAACAACAGCAGCAACCCAATCCCGCCCA
GCTGGGTGGCAACATTCCAGCACCACTCTCTGTCAACGTCGGTGGCTTTG
GCAATACCAATTTCGGTGGTGCAGCTGCCGGCGGAGCCGTGGGAGCCAAC
GATAAGCAGCAACTGAAGGTGGCCCAAGTGCATCCGCAGAGCCATGGCGT
AGGAGCGGGCGGTGCATCAGCGGGCGCCGGGGCGAGTGGTGGTCAAGTGG
CAGCCGGTTCCAGTGTCCTGATGCCAGCCGATACCACGGGCAGTGGTAAT
GCGGGCAATCCCAACCAGAATGCAGGCGGTGTAGCTGGAGGTGCCGGCGG
TGGCAATGGCGGAAACACTGGACCTCCGGGCGACAACGAGAAAGACTGGC
GGGAATCGGTGACCGCCGATCTGCGCAACCACCTCGTCCACAAACTGGTG
CAGGCCATCTTCCCCACCTCGGATCCTACGACCATGCAGGACAAACGGAT
GCATAATCTCGTTTCATACGCGGAAAAGGTCGAGAAGGACATGTACGAAA
TGGCCAAGTCCAGATCGGAGTACTATCACCTGCTGGCCGAGAAGATCTAC
AAGATTCAAAAGGAGCTGGAGGAGAAGCGACTGAAGCGTAAGGAGCAGCA
TCAGCAGATGCTGATGCAGCAACAGGGCGTTGCGAATCCAGTGGCTGGAG
GAGCGGCTGGCGGAGCAGGCAGTGCAGCTGGTGTAGCGGGCGGTGTAGTC
TTGCCCCAGCAGCAACAGCAGCAGCAACAACAACAGCAGCAGCAGGGTCA
GCAGCCTCTGCAGAGCTGTATCCATCCAAGCATCAGTCCAATGGGCGGTG
TGATGCCGCCGCAGCAGCTGCGTCCACAGGGACCACCTGGAATACTGGGC
CAACAGACGGCAGCAGGCCTGGGCGTCGGCGTGGGAGTGACCAACAATAT
GGTTACCATGCGCAGTCATTCGCCCGGTGGCAACATGCTCGCCTTGCAGC
AACAACAGCGCATGCAGTTCCCGCAACAACAGCAGCAACAACCGCCAGGG
TCTGGAGCCGGCAAAATGCTGGTCGGTCCACCAGGACCCAGTCCCGGTGG
CATGGTGGTCAATCCCGCGCTCTCGCCTTACCAGACGACCAATGTGCTCA
CCAGTCCGGTGCCAGGACAGCAGCAACAGCAGCAGTTCATTAATGCGAAC
GGCGGCACTGGCGCCAATCCTCAACTGAGCGAAATCATGAAGCAGCGTCA
CATTCACCAGCAGCAGCAGCAACAACAACAGCAGCAGCAGCAGGGAATGT
TGTTGCCGCAGTCGCCATTTAGCAATTCAACACCTCTACAACAACAACAG
CAGCAGCAGCAGCAACAACAGCAGCAGCAGGCGACTAGCAACAGTTTTAG
CTCACCAATGCAGCAACAGCAGCAAGGTCAGCAACAGCAACAACAGAAGC
CCGGCAGTGTGCTGAATAATATGCCGCCCACGCCCACGAGTCTGGAAGCC
CTGAATGCGGGGGCCGGAGCGCCGGGAACTGGAGGATCCGCCTCCAATGT
AACGGTTTCAGCTCCGAGCCCATCGCCTGGCTTCTTGTCCAACGGCCCGT
CGATTGGCACGCCCTCCAACAATAATAATAATAGTAGTGCTAACAACAAC
CCGCCCTCGGTGAGCAGTCTAATGCAACAGCCGCTGAGCAATCGGCCGGG
TACGCCTCCTTACATACCCGCTTCCCCAGTGCCGGCGACAAGTGCCTCCG
GATTAGCGGCGAGCAGTACGCCCGCATCAGCAGCAGCCACCTGTGCGAGT
AGTGGCAGTGGCAGCAATAGCAGCAGCGGAGCAACTGCAGCGGGTGCAAG
TTCCACGTCATCATCTTCCTCGGCGGGCTCGGGTACACCACTCAGCTCGG
TATCGACTCCTACATCGGCCACGATGGCCACCAGCAGCGGTGGTGGTGGT
GGTGGTGGGGGCAATGCAGGAGGCGGATCATCCACTACGCCCGCTAGCAA
TCCACTGCTCCTCATGTCTGGAGGAACGGCAGGAGGCGGAACGGGAGCAA
CGACCACCACATCGACATCCTCGAGCAGTCGCATGATGAGCAGCTCCAGC
AGTCTCTCCTCACAGATGGCTGCCCTGGAGGCTGCGGCGCGAGACAACGA
CGATGAGACGCCCTCGCCATCCGGCGAGAATACGAACGGCAGTGGTGGCA
GTGGAAATGCCGGCGGTATGGCCTCCAAGGGCAAACTGGACTCCATTAAG
CAAGATGATGATATCAAGAAGGAGTTTATGGATGACAGCTGTGGCGGAAA
TAACGATAGCTCGCAGATGGATTGCTCGACGGGTGGTGGCAAGGGCAAGA
ATGTGAACAACGACGGAACAAGCATGATCAAAATGGAGATCAAGACGGAG
GATGGACTCGATGGCGAGGTAAAGATCAAAACGGAGGCCATGGATGTGGA
CGAGGCTGGAGGATCGACAGCCGGAGAGCATCATGGCGAAGGTGGCGGCG
GCAGTGGTGTTGGCGGCGGTAAGGATAACATAAATGGTGCGCACGATGGC
GGAGCGACAGGCGGTGCTGTGGACATAAAACCCAAGACGGAGACGAAACC
ACTCGTACCGGAGCCACTGGCACCCAATGCAGGTGACAAGAAAAAGAAGT
GCCAATTCAATCCCGAGGAACTGCGCACCGCTCTCCTGCCAACGCTAGAG
AAGCTCTACAGGCAGGAGCCCGAATCCGTGCCCTTTCGCTACCCAGTTGA
TCCCCAGGCGCTGGGCATACCTGATTACTTTGAAATCGTTAAGAAGCCCA
TGGACCTGGGCACTATACGCACCAACATCCAGAATGGAAAGTACAGTGAT
CCCTGGGAATATGTGGACGACGTTTGGCTGATGTTCGACAATGCCTGGCT
GTATAATCGCAAAACATCGCGGGTCTATCGCTATTGCACAAAGCTTTCCG
AAGTCTTTGAGGCGGAGATTGATCCTGTGATGCAGGCACTGGGATATTGC
TGCGGCAGGAAGTACACATTCAATCCACAGGTGCTATGCTGCTACGGCAA
GCAGCTCTGCACGATTCCGCGGGATGCCAAGTACTACAGCTACCAGAACA
GTCTAAAGGAATACGGTGTCGCCTCAAATAGATACACCTACTGCCAAAAG
TGCTTTAACGACATCCAGGGCGATACGGTCACACTGGGCGACGATCCACT
GCAATCGCAAACCCAAATCAAAAAGGATCAGTTCAAGGAGATGAAGAACG
ATCACCTCGAACTGGAGCCGTTTGTCAATTGCCAGGAGTGCGGACGCAAA
CAGCACCAAATCTGCGTACTCTGGCTGGATTCTATCTGGCCCGGTGGCTT
CGTGTGCGATAACTGCCTGAAAAAGAAGAACTCAAAGCGGAAGGAGAACA
AGTTCAATGCGAAACGCCTGCCCACCACCAAGCTGGGCGTGTACATAGAG
ACGCGGGTGAATAATTTCCTCAAGAAGAAGGAGGCTGGTGCCGGCGAGGT
GCACATTCGTGTGGTCAGCTCATCGGACAAGTGTGTAGAGGTGAAGCCCG
GCATGCGTCGACGATTCGTCGAGCAGGGCGAGATGATGAACGAGTTCCCA
TACCGAGCCAAAGCGCTCTTTGCCTTCGAGGAGGTGGATGGCATCGATGT
GTGCTTCTTTGGCATGCACGTTCAGGAGTATGGATCCGAGTGCCCGGCGC
CGAATACGCGGCGTGTGTATATTGCCTATTTGGATTCCGTTCATTTCTTC
CGGCCAAGACAGTACCGTACAGCGGTATATCACGAAATCCTGCTCGGCTA
TATGGACTACGTGAAACAGCTGGGCTACACAATGGCCCATATCTGGGCCT
GTCCGCCATCCGAGGGCGATGACTACATCTTTCACTGCCATCCCACGGAC
CAGAAGATACCCAAGCCCAAGCGCCTGCAGGAGTGGTACAAAAAGATGCT
TGACAAGGGAATGATCGAGCGCATCATACAGGACTACAAGGATATCCTGA
AGCAGGCGATGGAGGACAAACTGGGCTCTGCCGCAGAGCTGCCCTACTTT
GAGGGCGACTTCTGGCCCAATGTGCTGGAGGAGAGCATCAAGGAACTGGA
CCAGGAGGAGGAAGAGAAGCGCAAACAGGCCGAGGCCGCGGAAGCAGCAG
CTGCGGCAAATCTTTTCTCTATCGAGGAAAATGAAGTAAGCGGCGATGGC
AAAAAGAAGGGCCAGAAGAAGGCCAAAAAGTCGAACAAATCGAAAGCGGC
GCAGCGTAAGAACAGCAAAAAGTCCAACGAACATCAGTCGGGCAATGATC
TCTCCACAAAGATATATGCGACCATGGAGAAGCACAAGGAGGTCTTCTTC
GTTATCCGTCTGCATTCGGCGCAGTCGGCAGCTAGTTTAGCGCCCATCCA
GGATCCCGATCCGCTGCTCACATGCGATCTGATGGATGGACGCGATGCCT
TCCTCACGCTCGCCCGCGACAAGCACTTTGAGTTCTCGTCGCTGCGGCGC
GCACAATTCTCCACTCTGTCCATGTTGTATGAGCTGCATAACCAGGGTCA
GGACAAGTTTGTTTACACCTGCAACCACTGCAAGACGGCCGTGGAGACGC
GCTACCACTGTACTGTTTGTGATGACTTCGATCTGTGTATCGTGTGCAAG
GAGAAGGTTGGCCATCAGCACAAGATGGAGAAGCTCGGCTTCGACATCGA
CGACGGCTCTGCGCTGGCGGATCACAAGCAGGCTAATCCACAGGAGGCCC
GCAAGCAATCCATCCAGCGTTGCATCCAATCGCTGGCGCACGCCTGCCAG
TGTCGCGATGCCAACTGCCGCCTGCCATCGTGCCAGAAGATGAAGCTCGT
TGTCCAGCATACGAAGAACTGCAAGCGCAAGCCCAACGGAGGATGCCCCA
TTTGCAAGCAGCTTATCGCACTCTGTTGCTATCACGCGAAGAACTGTGAG
GAGCAGAAGTGCCCCGTGCCGTTCTGTCCCAACATCAAGCACAAGCTCAA
GCAGCAGCAGTCACAGCAGAAATTCCAGCAGCAGCAGTTGCTGCGTCGCC
GTGTGGCGCTCATGTCGCGTACAGCAGCTCCAGCGGCTCTGCAAGGCCCA
GCTGCAGTAAGCGGTCCGACCGTCGTCTCTGGAGGAGTGCCCGTGGTGGG
CATGTCCGGTGTGGCAGTTAGCCAACAGGTGATCCCCGGCCAGGCGGGTA
TACTGCCTCCAGGGGCGGGTGGCATGTCGCCATCTACCGTGGCAGTTCCA
TCGCCTGTTTCAGGAGGAGCGGGAGCCGGTGGAATGGGTGGAATGACATC
ACCACATCCGCATCAACCAGGTATAGGTATGAAACCTGGTGGCGGTCACT
CGCCGTCTCCAAATGTCCTACAAGTGGTGAAGCAGGTCCAGGAAGAGGCA
GCTCGTCAGCAGGTATCGCATGGCGGTGGCTTCGGCAAGGGCGTACCCAT
GGCGCCGCCCGTAATGAATCGACCAATGGGCGGCGCTGGGCCCAACCAAA
ATGTTGTTAATCAACTTGGTGGCATGGGCGTTGGAGTTGAAGGTGTCGGT
GGTGTTGGCGTCGGAGGCGTTGGTGGAGTGGGTGTTAATCAACTGAATTC
GGGTGGTGGCAATACACCCGGTGCACCCATTTCCGGTCCCGGAATGAATG
TCAATCATCTAATGTCCATGGATCAGTGGGGCGGTGGCGGAGCCGGCGGC
GGAGGTGCCAATCCCGGCGGTGGCAATCCACAAGCCCGCTATGCCAACAA
TACCGGCGGCATGCGCCAACCCACCCATGTGATGCAAACGAATCTGATAC
CGCCGCAGCAACAGCAACAGATGATGGGCGGACTGGGCGGACCCAACCAA
CTGGGAGGTGGCCAAATGCCAGTCGGCGGACAGCATGGAGGAATGGGAAT
GGGCATGGGAGCACCACCAATGGCCGGAACTGTTGGCGGAGTGCGTCCAT
CTCCCGGAGCAGGAGGTGGAGGTGGAAGTGCGACTGGGGGCGGTCTAAAT
ACGCAACAACTCGCCCTGATTATGCAAAAGATTAAGAACAATCCCACCAA
CGAGAGCAACCAGCACATCCTTGCCATACTAAAACAGAATCCGCAGATCA
TGGCGGCGATCATCAAGCAGCGCCAGCAGTCGCAGAACAATGCGGCAGCG
GGCGGAGGAGCACCTGGCCCAGGTGGAGCCCTACAGCAGCAGCAGGCCGG
TAACGGACCGCAAAATCCTCAACAGCAGCAGCAGCAGCAGCAACAGCAAC
AGGTGATGCAGCAACAGCAGATGCAGCACATGATGAACCAGCAGCAGGGC
GGCGGCGGTCCACAGCAGATGAATCCCAACCAGCAGCAGCAACAGCAGCA
GGTTAATCTCATGCAGCAGCAGCAACAAGGTGGACCCGGAGGACCAGGTT
CTGGACTTCCCACGCGCATGCCCAATATGCCCAATGCCTTGGGTATGCTG
CAGAGTCTTCCGCCCAACATGTCGCCAGGCGTTTCTACTCAGGGAGGAAT
GGTGCCCAACCAAAACTGGAACAAGATGCGTTACATGCAAATGAGCCAGT
ACCCGCCACCGTATCCGCAGCGCCAGCGTGGCCCGCACATGGGCGGAGCG
GGACCTGGTCCCGGCCAGCAACAGTTCCCCGGTGGCGGAGGTGGAGCGGG
CAACTTTAATGCGGGTGGTGCTGGTGGTGCAGGCGGCGTTGTCGGTGTGG
GCGGAGTGCCCGGAGGTGCCGGCACGGTGCCCGGTGGCGATCAATACTCG
ATGGCGAATGCCGCGGCTGCCTCCAATATGCTGCAACAGCAGCAGGGCCA
GGTGGGCGTCGGAGTGGGCGTGGGCGTGAAACCAGGACCCGGCCAACAGC
AACAGCAGATGGGCGTTGGCATGCCGCCGGGTATGCAGCAGCAACAGCAG
CAACAGCAACCGCTGCAGCAGCAGCAGATGATGCAGGTAGCAATGCCAAA
TGCGAATGCCCAGAATCCGTCGGCGGTGGTTGGCGGACCCAATGCTCAGG
TGATGGGTCCGCCGACGCCGCACTCTCTGCAGCAGCAGCTGATGCAATCG
GCCCGCTCGTCGCCGCCTATTCGCTCCCCGCAGCCAACGCCATCGCCACG
TTCGGCTCCATCGCCACGTGCTGCTCCATCCGCCTCGCCTAGGGCACAGC
CCTCGCCGCACCATGTGATGAGCAGTCACTCGCCAGCGCCGCAGGGACCA
CCGCATGACGGCATGCACAATCATGGCATGCATCATCAGTCGCCACTGCC
AGGAGTGCCGCAGGATGTTGGCGTCGGAGTCGGTGTCGGCGTTGGCGTTG
GCGTTAACGTTAACGTCGGCAACGTGGGCGTCGGCAATGCCGGAGGAGCC
CTGCCCGACGCCTCCGACCAGCTGACCAAGTTTGTGGAGCGACTCTAGTG
CAGCAACAGCAGCAGCACCAGCACCAGCACCACCACCAGCTACAATGGTT
GGTAGGCGATGTGGCTAGAGGGCTAGGGCTAGACTGAATGAATGAATGAG
TGTCCAGTAGCCGCAGACGGGATGACGACGAAGACCAACCGGCAGGGATA
ACCAGTGTGTGTTAAGCGAATTAACAACTATTACTAACTTAAATCTTTTT
TTTTTTTTTAAACGGCACCACAAATAATTGTATATTGTTATAATTAAATC
AACAAATATCGCGCCTAATGTGTACTGTAGATTAAGATGACCCACCATTA
CAACCACTAACAAATACCTTATTATTTAAGTTTAAGACGAAAGTTGGACA
GAGCATTATGATTCGATTTCCATTTTATGTCCGCGATTTAGCAAATATAT
AATATCATATATTTCATATGCCCCCAAAACACACACACACCATGTATTAA
TTAATGCGATTCCTTCGTTTCCACTAAGCAGATATAGAAAAAAAAAAA

(SEQ ID NO:90)

MMADHLDEPPQKRVKMDPTDISYFLEENLPDELVSSNSGWSDQLTGGAGG
GNGGGGASGVTTNPTSGPNPGGGPNKPAAQGPGSGTGGVGVGVNVGVGGV
VGVGVVPSQMNGAGGGNGSGTGGDDGSGNGSGAGNRISQMQHQQLQHLLQ
QQQQGQKGAMVVPGMQQLGSKSPNLQSPNQGGMQQVVGTQMGMVNSMPMS
ISNNGNNGMNAIPGMNTIAQGNLGNMVLTNSVGGGMGGMVNHLKQQPGGG
GGGMINSVSVPGGPGAGAGGVGAGGGGAVAANQGMHMQNGPMMGRMVGQQ
HMLRGPHLMGASGGAGGPGNGPGGGGPRMQNPNMQMTQLNSLPYGVGQYG
GPGGGNNPQQQQQQQQQQLLAQQMAQRGGVVPGMPQGNRPVGTVVPMSTL
GGDGSGPAGQLVSGNPQQQQMLAQQQTGAMGPRPPQPNQLLGHPGQQQQQ
QQQPGTSQQQQQQQGVGIGGAGVVANAGTVAGVPAVAGGGAGGAVQSSGP
GGANRDVPDDRKRQIQQQLMLLLHAHKCNRRENLNPNREVCNVNYCKAMK
SVLAHMGTCKQSKDCTMQHCASSRQILLHYKTCQNSGCVICYPFRQNHSV
FQNANVPPGGGPAGIGGAPPGGGGAGGGAAGAGGNLQQQQQQQQQQQQNQ
QPNLTGLVVDGKQGQQVAPGGGQNTAIVLPQQQGAGGAPGAPKTPADMVQ
QLTQQQQQQQQQVHQQQVQQQELRRFDGMSQQVVAGGMQQQQQQGLPPVI
RIQGAQPAVRVLGPGGPGGPSGPNVLPNDVNSLHQQQQQMLQQQQQQGQN
RRRGGLATMVEQQQQHQQQQQQPNPAQLGGNIPAPLSVNVGGFGNTNFGG
AAAGGAVGANDKQQLKVAQVHPQSHGVGAGGASAGAGASGGQVAAGSSVL
MPADTTGSGNAGNPNQNAGGVAGGAGGGNGGNTGPPGDNEKDWRESVTAD
LRNHLVHKLVQAIFPTSDPTTMQDKRMHNLVSYAEKVEKDMYEMAKSRSE
YYHLLAEKIYKIQKELEEKRLKRKEQHQQMLMQQQGVANPVAGGAAGGAG
SAAGVAGGVVLPQQQQQQQQQQQQQGQQPLQSCIHPSISPMGGVMPPQQL
RPQGPPGILGQQTAAGLGVGVGVTNNMVTMRSHSPGGNMLALQQQQRMQF
PQQQQQQPPGSGAGKMLVGPPGPSPGGMVVNPALSPYQTTNVLTSPVPGQ
QQQQQFINANGGTGANPQLSEIMKQRHIHQQQQQQQQQQQQGMLLPQSPF
SNSTPLQQQQQQQQQQQQQQATSNSFSSPMQQQQQGQQQQQQKPGSVLNN
MPPTPTSLEALNAGAGAPGTGGSASNVTVSAPSPSPGFLSNGPSIGTPSN
NNNNSSANNNPPSVSSLMQQPLSNRPGTPPYIPASPVPATSASGLAASST
PASAAATCASSGSGSNSSSGATAAGASSTSSSSSAGSGTPLSSVSTPTSA
TMATSSGGGGGGGGNAGGGSSTTPASNPLLLMSGGTAGGGTGATTTTSTS
SSSRMMSSSSSLSSQMAALEAAARDNDDETPSPSGENTNGSGGSGNAGGM
ASKGKLDSIKQDDDIKKEFMDDSCGGNNDSSQMDCSTGGGKGKNVNNDGT
SMIKMEIKTEDGLDGEVKIKTEAMDVDEAGGSTAGEHHGEGGGGSGVGGG
KDNINGAHDGGATGGAVDIKPKTETKPLVPEPLAPNAGDKKKKCQFNPEE
LRTALLPTLEKLYRQEPESVPFRYPVDPQALGIPDYFEIVKKPMDLGTIR
TNIQNGKYSDPWEYVDDVWLMFDNAWLYNRKTSRVYRYCTKLSEVFEAEI
DPVMQALGYCCGRKYTFNPQVLCCYGKQLCTIPRDAKYYSYQNSLKEYGV
ASNRYTYCQKCFNDIQGDTVTLGDDPLQSQTQIKKDQFKEMKNDHLELEP
FVNCQECGRKQHQICVLWLDSIWPGGFVCDNCLKKKNSKRKENKFNAKRL
PTTKLGVYIETRVNNFLKKKEAGAGEVHIRVVSSSDKCVEVKPGMRRRFV
EQGEMMNEFPYRAKALFAFEEVDGIDVCFFGMHVQEYGSECPAPNTRRVY
IAYLDSVHFFRPRQYRTAVYHEILLGYMDYVKQLGYTMAHIWACPPSEGD
DYIFHCHPTDQKIPKPKRLQEWYKKMLDKGMIERIIQDYKDILKQAMEDK
LGSAAELPYFEGDFWPNVLEESIKELDQEEEEKRKQAEAAEAAAAANLFS
IEENEVSGDGKKKGQKKAKKSNKSKAAQRKNSKKSNEHQSGNDLSTKIYA
TMEKHKEVFFVIRLHSAQSAASLAPIQDPDPLLTCDLMDGRDAFLTLARD
KHFEFSSLRRAQFSTLSMLYELHNIQGQDKFVYTCNHCKTAVETRYHCTVC
DDFDLCIVCKEKVGHQHKMEKLGFDIDDGSALADHKQANPQEARKQSIQR
CIQSLAHACQCRDANCRLPSCQKMKLVVQHTKNCKRKPNGGCPICKQLIA
LCCYHAKNCEEQKCPVPFCPNIKHKLKQQQSQQKFQQQQLLRRRVALMSR
TAAPAALQGPAAVSGPTVVSGGVPVVGMSGVAVSQQVIPGQAGILPPGAG
GMSPSTVAVPSPVSGGAGAGGMGGMTSPHPHQPGIGMKPGGGHSPSPNVL
QVVKQVQEEAARQQVSHGGGFGKGVPMAPPVMNRPMGGAGPNQNVVNQLG
GMGVGVEGVGGVGVGGVGGVGVNQLNSGGGNTPGAPISGPGMNVNHLMSM
DQWGGGGAGGGGANPGGGNPQARYANNTGGMRQPTHVMQTNLIPPQQQQQ
MMGGLGGPNQLGGGQMPVGGQHGGMGMGMGAPPMAGTVGGVRPSPGAGGG
GGSATGGGLNTQQLALIMQKIKNNPTNESNQHILAILKQNPQIMAAIIKQ
RQQSQNNAAAGGGAPGPGGALQQQQAGNGPQNPQQQQQQQQQQQVMQQQQ
MQHMMNQQQGGGGPQQMNPNQQQQQQQVNLMQQQQQGGPGGPGSGLPTRM
PNMPNALGMLQSLPPNMSPGVSTQGGMVPNQNWNKMRYMQMSQYPPPYPQ
RQRGPHMGGAGPGPGQQQFPGGGGGAGNFNAGGAGGAGGVVGVGGVPGGA
GTVPGGDQYSMANAAAASNMLQQQQGQVGVGVGVGVKPGPGQQQQQMGVG
MPPGMQQQQQQQQPLQQQQMMQVAMPNANAQNPSAVVGGPNAQVMGPPTP
HSLQQQLMQSARSSPPIRSPQPTPSPRSAPSPRAAPSASPRAQPSPHHVM
SSHSPAPQGPPHDGMHNHGMHHQSPLPGVPQDVGVGVGVGVGVGVNVNVG
NVGVGNAGGALPDASDQLTKFVERL

[0404] Human homologue of Complete Genome candidate

[0405] AAC51331—CREB-binding protein

| | | |
|---|---|---|
| 1 | tccgaattcc ttttttttaa ttgaggaatc aacagccgcc atcttgtcgc ggacccgacc | (SEQ ID NO:91) |
| 61 | ggggcttcga gcgcgatcta ctcggccccg ccggtcccgg gccccacaac cgcccgcgca | |
| 121 | ccccgctccg cccggccggc ccgctccgcc cggccctcgg cgcccgcccc ggcggccccg | |
| 181 | ctcgcctctc ggctcggcct cccggagccc ggcggcggcg gcggcggcag cggcggcggc | |
| 241 | ggcggcggaa cggggggtgg gggggccgcg gcggcggcgg cgaccccgct cggcgcattg | |
| 301 | tttttcctca cggcggcggc ggcggcgggc cgcgggccgg gagcggagcc cggagccccc | |
| 361 | tcgtcgtcgg gccgcgagcg aattcattaa gtggggcgcg gggggggagc gaggcggcgg | |
| 421 | cggcggcggc accatgttct cggggactgc ctgagccgcc cggccgggcg ccgtcgctgc | |
| 481 | cagccgggcc cgggggggcg gccgggccgc cggggcgccc ccaccgcgga gtgtcgcgct | |
| 541 | cgggaggcgg gcaggggatg agggggccgc ggccggcggc ggcggcggcg gccgggggcg | |
| 601 | ggcggtgagc gctgcggggc gctgttgctg tggctgagat ttggccgccg cctcccccac | |
| 661 | ccggcctgcg ccctccctct ccctcggcgc ccgcccgcgc cgctcgcggc gcccgcgctc | |
| 721 | gctcctctcc ctcgcagccg gcagggcccc cgacccccgt ccgggccctc gccggcccgg | |
| 781 | ccgcccgtgc ccggggctgt tttcgcgagc aggtgaaaat ggctgagaac ttgctggacg | |
| 841 | gaccgcccaa ccccaaaaga gccaaactca gctcgcccgg tttctcggcg aatgacagca | |
| 901 | cagattttgg atcattgttt gacttggaaa atgatcttcc tgatgagctg atacccaatg | |
| 961 | gaggagaatt aggcctttta aacagtggga accttgttcc agatgctgct tccaaacata | |
| 1021 | aacaactgtc ggagcttcta cgaggaggca gcggctctag tatcaaccca ggaataggaa | |
| 1081 | atgtgagcgc cagcagcccc gtgcagcagg gcctgggtgg ccaggctcaa gggcagccga | |
| 1141 | acagtgctaa catggccagc ctcagtgcca tgggcaagag ccctctgagc cagggagatt | |
| 1201 | cttcagcccc cagcctgcct aaacaggcag ccagcacctc tgggcccacc cccgctgcct | |
| 1261 | cccaagcact gaatccgcaa gcacaaaagc aagtggggct ggcgactagc agccctgcca | |
| 1321 | cgtcacagac tggacctggt atctgcatga atgctaactt taaccagacc cacccaggcc | |
| 1381 | tcctcaatag taactctggc catagcttaa ttaatcaggc ttcacaaggg caggcgcaag | |
| 1441 | tcatgaatgg atctcttggg gctgctggca gaggaagggg agctggaatg ccgtacccta | |
| 1501 | ctccagccat gcagggcgcc tcgagcagcg tgctggctga gaccctaacg caggtttccc | |
| 1561 | cgcaaatgac tggtcacgcg ggactgaaca ccgcacaggc aggaggcatg gccaagatgg | |
| 1621 | gaataactgg gaacacaagt ccatttggac agccctttag tcaagctgga gggcagccaa | |
| 1681 | tgggagccac tggagtgaac ccccagttag ccagcaaaca gagcatggtc aacagtttgc | |
| 1741 | ccaccttccc tacagatatc aagaatactt cagtcaccaa cgtgccaaat atgtctcaga | |
| 1801 | tgcaaacatc agtgggaatt gtacccacac aagcaattgc aacaggcccc actgcagatc | |
| 1861 | ctgaaaaacg caaactgata cagcagcagc tggttctact gcttcatgct cataagtgtc | |
| 1921 | agagacgaga gcaagcaaac ggagaggttc gggcctgctc gctcccgcat tgtcgaacca | |
| 1981 | tgaaaaacgt tttgaatcac atgacgcatt gtcaggctgg gaaagcctgc caagttgccc | |
| 2041 | attgtgcatc ttcacgacaa atcatctctc attggaagaa ctgcacacga catgactgtc | |
| 2101 | ctgtttgcct ccctttgaaa aatgccagtg acaagcgaaa ccaacaaacc atcctggggt | |
| 2161 | ctccagctag tggaattcaa aacacaattg gttctgttgg cacagggcaa cagaatgcca | |
| 2221 | cttctttaag taacccaaat cccatagacc ccagctccat gcagcgagcc tatgctgctc | |
| 2281 | tcggactccc ctacatgaac cagccccaga cgcagctgca gcctcaggtt cctggccagc | |
| 2341 | aaccagcaca gcctcaaacc caccagcaga tgaggactct caaccccctg ggaaataatc | |
| 2401 | caatgaacat tccagcagga ggaataacaa cagatcagca gcccccaaac ttgatttcag | |
| 2461 | aatcagctct tccgacttcc ctgggggcca caaacccact gatgaacgat ggctccaact | |
| 2521 | ctggtaacat tggaaccctc agcactatac caacagcagc tcctccttct agcaccggtg | |
| 2581 | taaggaaagg ctggcacgaa catgtcactc aggacctgcg gagccatcta gtgcataaac | |
| 2641 | tcgtccaagc catcttccca acacctgatc ccgcagctct aaaggatcgc cgcatggaaa | |
| 2701 | acctggtagc ctatgctaag aaagtggaag gggacatgta cgagtctgcc aacagcaggg | |
| 2761 | atgaatatta tcacttatta gcagagaaaa tctacaagat acaaaaagaa ctagaagaaa | |
| 2821 | aacggaggtc gcgtttacat aaacaaggca tcttggggaa ccagccagcc ttaccagccc | |
| 2881 | cgggggctca gccccctgtg attccacagg cacaacctgt gagacctcca aatggacccc | |
| 2941 | tgtccctgcc agtgaatcgc atgcaagttt ctcaagggat gaattcattt aaccccatgt | |
| 3001 | ccttggggaa cgtccagttg ccacaagcac ccatgggacc tcgtgcagcc tccccaatga | |
| 3061 | accactctgt ccagatgaac agcatgggct cagtgccagg gatggccatt tctccttccc | |
| 3121 | gaatgcctca gcctccgaac atgatgggtg cacacaccaa caacatgatg gcccaggcgc | |
| 3181 | ccgctcagag ccagtttctg ccacagaacc agttcccgtc atccagcggg gcgatgagtg | |
| 3241 | tgggcatggg gcagccgcca gcccaaacag gcgtgtcaca gggacaggtg cctggtgctg | |
| 3301 | ctcttcctaa ccctctcaac atgctggggc ctcaggccag ccagctacct tgccctccag | |
| 3361 | tgacacagtc accactgcac ccaacaccgc ctcctgcttc cacggctgct ggcatgccat | |
| 3421 | ctctccagca cacgacacca cctgggatga ctcctcccca gccagcagct cccactcagc | |
| 3481 | catcaactcc tgtgtcgtct tccgggcaga ctcccacccc gactcctggc tcagtgccca | |
| 3541 | gtgctaccca aacccagagc acccctacag tccaggcagc agcccaggcc caggtgaccc | |
| 3601 | cgcagcctca aaccccagtt cagcccccgt ctgtggctac ccctcagtca tcgcagcaac | |
| 3661 | agccgacgcc tgtgcacgcc cagcctcctg gcacaccgct ttcccaggca gcagccagca | |
| 3721 | ttgataacag agtccctacc ccctcctcgg tggccagcgc agaaaccaat tcccagcagc | |
| 3781 | caggacctga cgtacctgtg ctggaaatga agacggagac ccaagcagag gacactgagc | |
| 3841 | ccgatcctgg tgaatccaaa ggggagccca ggtctgagat gatggaggag gatttgcaag | |
| 3901 | gagcttccca agttaaagaa gaaacagaca tagcagagca gaaatcagaa ccaatggaag | |
| 3961 | tggatgaaaa gaaacctgaa gtgaaagtag aagttaaaga ggaagaagag agtagcagta | |
| 4021 | acggcacagc ctctcagtca acatctcctt cgcagccgcg caaaaaaatc tttaaaccag | |
| 4081 | aggagttacg ccaggccctc atgccaaccc tagaagcact gtatcgacag gacccagagt | |
| 4141 | cattaccttt ccggcagcct gtagatcccc agctcctcgg aattccagac tattttgaca | |
| 4201 | tcgtaaagaa tcccatggac ctctccacca tcaagcggaa gctggacaca gggcaatacc | |
| 4261 | aagagccctg gcagtacgtg gacgacgtct ggctcatgtt caacaatgcc tggctctata | |
| 4321 | atcgcaagac atcccgagtc tataagtttt gcagtaagct tgcagaggtc tttgagcagg | |
| 4381 | aaattgaccc tgtcatgcag tcccttggat attgctgtgg acgcaagtat gagttttccc | |
| 4441 | cacagacttt gtgctgctat gggaagcagc tgtgtaccat tcctcgcgat gctgcctact | |
| 4501 | acagctatca gaataggtat catttctgtg agaagtgttt cacagagatc cagggcgaga | |
| 4561 | atgtgaccct gggtgacgac ccttcacagc cccagacgac aatttcaaag gatcagtttg | |
| 4621 | aaaagaagaa aaatgatacc ttagaccccg aacctttcgt tgattgcaag gagtgtggcc | |
| 4681 | ggaagatgca tcagatttgc gttctgcact atgacatcat ttggccttca ggttttgtgt | |
| 4741 | gcgacaactg cttgaagaaa actggcagac ctcgaaaaga aaacaaattc agtgctaaga | |
| 4801 | ggctgcagac cacaagactg ggaaaccact tggaagaccg agtgaacaaa tttttgcggc | |
| 4861 | gccagaatca ccctgaagcc ggggaggttt ttgtccgagt ggtggccagc tcagacaaga | |
| 4921 | cggtggaggt caagcccggg atgaagtcac ggtttgtgga ttctggggaa atgtctgaat | |
| 4981 | ctttcccata tcgaaccaaa gctctgtttg cttttgagga aattgacggc gtggatgtct | |
| 5041 | gcttttttgg aatgcacgtc caagaatacg gctctgattg cccccctcca aacacgaggc | |
| 5101 | gtgtgtacat ttcttatctg gatagtattc atttcttccg gccacgttgc ctccgcacag | |
| 5161 | ccgtttacca tgagatcctt attggatatt tagagtatgt gaagaaatta gggtatgtga | |
| 5221 | cagggcacat ctgggcctgt cctccaagtg aaggagatga ttacatcttc cattgccacc | |
| 5281 | cacctgatca aaaaataccc aagccaaaac gactgcagga gtggtacaaa aagatgctgg | |
| 5341 | acaaggcgtt tgcagagcgg atcatccatg actacaagga tattttcaaa caagcaactg | |
| 5401 | aagacaggct caccagtgcc aaggaactgc cctattttga aggtgatttc tggcccaatg | |
| 5461 | tgttagaaga gagcattaag gaactagaac aagaagaaga ggagaggaaa aaggaagaga | |
| 5521 | gcactgcagc cagtgaaacc actgagggca gtcagggcga cagcaagaat gccaagaaga | |
| 5581 | agaacaacaa gaaaaccaac aagaacaaaa gcagcatcag ccgcgccaac aagaagaagc | |
| 5641 | ccagcatgcc caacgtgtcc aatgacctgt cccagaagct gtatgccacc atggagaagc | |
| 5701 | acaaggaggt cttcttcgtg atccacctgc acgctgggcc tgtcatcaac accctgcccc | |
| 5761 | ccatcgtcga ccccgacccc ctgctcagct gtgacctcat ggatgggcgc gacgccttcc | |
| 5821 | tcaccctcgc cagagacaag cactgggagt tctcctcctt gcgccgctcc aagtggtcca | |
| 5881 | cgctctgcat gctggtggag ctgcacaccc agggccagga ccgctttgtc tacacctgca | |
| 5941 | acgagtgcaa gcaccacgtg gagacgcgct ggcactgcac tgtgtgcgag gactacgacc | |
| 6001 | tctgcatcaa ctgctataac acgaagagcc atgcccataa gatggtgaag tgggggctgg | |
| 6061 | gcctggatga cgagggcagc agccagggcg agccacagtc aaagagcccc caggagtcac | |
| 6121 | gccggctgag catccagcgc tgcatccagt cgctggtgca cgcgtgccag tgccgcaacg | |
| 6181 | ccaactgctc gctgccatcc tgccagaaga tgaagcgggt ggtgcagcac accaagggct | |
| 6241 | gcaaacgcaa gaccaacggg ggctgcccgg tgtgcaagca gctcatcgcc ctctgctgct | |
| 6301 | accacgccaa gcactgccaa gaaaacaaat gccccgtgcc cttctgcctc aacatcaaac | |
| 6361 | acaagctccg ccagcagcag atccagcacc gcctgcagca ggcccagctc atgcgccggc | |
| 6421 | ggatggccac catgaacacc cgcaacgtgc ctcagcagag tctgccttct cctacctcag | |
| 6481 | caccgcccgg gacccccaca cagcagccca gcacacccca gacgccgcag ccccctgccc | |
| 6541 | agccccaacc ctcacccgtg agcatgtcac cagctggctt ccccagcgtg gcccggactc | |
| 6601 | agccccccac cacggtgtcc acagggaagc ctaccagcca ggtgccggcc cccccacccc | |
| 6661 | cggcccagcc ccctcctgca gcggtggaag cggctcggca gatcgagcgt gaggcccagc | |
| 6721 | agcagcagca cctgtaccgg gtgaacatca acaacagcat gcccccagga cgcacgggca | |
| 6781 | tggggacccc ggggagccag atggcccccg tgagcctgaa tgtgccccga cccaaccagg | |
| 6841 | tgagcgggcc cgtcatgccc agcatgcctc ccgggcagtg gcagcaggcg ccccttcccc | |
| 6901 | agcagcagcc catgccaggc ttgcccaggc ctgtgatatc catgcaggcc caggcggccg | |
| 6961 | tggctgggcc ccggatgccc agcgtgcagc cacccaggag catctcaccc agcgctctgc | |
| 7021 | aagacctgct gcggaccctg aagtcgccca gctcccctca gcagcaacag caggtgctga | |
| 7081 | acattctcaa atcaaacccg cagctaatgg cagctttcat caaacagcgc acagccaagt | |
| 7141 | acgtggccaa tcagcccggc atgcagcccc agcctggcct ccagtcccag cccggcatgc | |
| 7201 | aaccccagcc tggcatgcac cagcagccca gcctgcagaa cctgaatgcc atgcaggctg | |
| 7261 | gcgtgccgcg gcccggtgtg cctccacagc agcaggcgat gggaggcctg aacccccagg | |
| 7321 | gccaggcctt gaacatcatg aacccaggac acaaccccaa catggcgagt atgaatccac | |
| 7381 | agtaccgaga aatgttacgg aggcagctgc tgcagcagca gcagcaacag cagcagcaac | |
| 7441 | aacagcagca acagcagcag cagcaaggga gtgccggcat ggctgggggc atggcggggc | |
| 7501 | acggccagtt ccagcagcct caaggacccg gaggctaccc accggccatg cagcagcagc | |
| 7561 | agcgcatgca gcagcatctc cccctccagg gcagctccat gggccagatg gcggctcaga | |
| 7621 | tgggacagct tggccagatg gggcagccgg ggctgggggc agacagcacc cccaacatcc | |
| 7681 | agcaagccct gcagcagcgg attctgcagc aacagcagat gaagcagcag attgggtccc | |
| 7741 | caggccagcc gaaccccatg agcccccagc aacacatgct ctcaggacag ccacaggcct | |
| 7801 | cgcatctccc tggccagcag atcgccacgt cccttagtaa ccaggtgcgg tctccagccc | |
| 7861 | ctgtccagtc tccacggccc cagtcccagc ctccacattc cagcccgtca ccacggatac | |
| 7921 | agccccagcc ttcgccacac cacgtctcac cccagactgg ttccccccac cccggactcg | |
| 7981 | cagtcaccat ggccagctcc atagatcagg gacacttggg gaaccccgaa cagagtgcaa | |
| 8041 | tgctccccca gctgaacacc cccagcagga gtgcgctgtc cagcgaactg tccctggtcg | |
| 8101 | gggacaccac gggggacacg ctagagaagt ttgtggaggg cttgtag | |
| 1 | maenlldgpp npkraklssp gfsandstdf gslfdlendl pdelipngge lgllnsgnlv | (SEQ ID NO:92) |
| 61 | pdaaskhkql sellrggsgs sinpgignvs asspvqqglg gqaqgqpnsa nmaslsamgk | |
| 121 | splsqgdssa pslpkqaast sgptpaasqa lnpqaqkqvg latsspatsq tgpgicmnan | |
| 181 | fnqthpglln snsghslinq asqgqaqvmn gslgaagrgr gagmpyptpa mqgasssvla | |
| 241 | etltqvspqm tghaglntaq aggmakmgit gntspfgqpf sqaggqpmga tgvnpqlask | |
| 301 | qsmvnslptf ptdikntsvt nvpnmsqmqt svgivptqai atgptadpek rkliqqqlvl | |
| 361 | llhahkcqrr eqangevrac slphcrtmkn vlnhmthcqa gkacqvahca ssrqiishwk | |
| 421 | nctrhdcpvc lplknasdkr nqqtilgspa sgiqntigsv gtgqqnatsl snpnpidpss | |
| 481 | mqrayaalgl pymnqpqtql qpqvpgqqpa qpqthqqmrt lnplgnnpmn ipaggittdq | |
| 541 | qppnlisesa lptslgatnp lmndgsnsgn igtlstipta appsstgvrk gwhehvtqdl | |
| 601 | rshlvhklvq aifptpdpaa lkdrrmenlv ayakkvegdm yesansrdey yhllaekiyk | |
| 661 | iqkeleekrr srlhkqgilg nqpalpapga qppvipqaqp vrppngplsl pvnrmqvsqg | |
| 721 | mnsfnpmslg nvqlpqapmg praaspmnhs vqmnsmgsvp gmaispsrmp qppnmmgaht | |
| 781 | nnmmaqapaq sqflpqnqfp sssgamsvgm gqppaqtgvs qgqvpgaalp nplnmlgpqa | |
| 841 | sqlpcppvtq splhptpppa staagmpslq httppgmtpp qpaaptqpst pvsssgqtpt | |
| 901 | ptpgsvpsat qtqstptvqa aaqaqvtpqp qtpvqppsva tpqssqqqpt pvhaqppgtp | |
| 961 | lsqaaasidn rvptpssvas aetnsqqpgp dvpvlemkte tqaedtepdp geskgeprse | |
| 1021 | mmeedlqgas qvkeetdiae qksepmevde kkpevkvevk eeeesssngt asqstspsqp | |
| 1081 | rkkifkpeel rqalmptlea lyrqdpeslp frqpvdpqll gipdyfdivk npmdlstikr | |
| 1141 | kldtgqyqep wqyvddvwlm fnnawlynrk tsrvykfcsk laevfeqeid pvmqslgycc | |
| 1201 | grkyefspqt lccygkqlct iprdaayysy qnryhfcekc fteiqgenvt lgddpsqpqt | |
| 1261 | tiskdqfekk kndtldpepf vdckecgrkm hqicvlhydi iwpsgfvcdn clkktgrprk | |
| 1321 | enkfsakrlq ttrlgnhled rvnkflrrqn hpeagevfvr vvassdktve vkpgmksrfv | |
| 1381 | dsgemsesfp yrtkalfafe eidgvdvcff gmhvqeygsd cpppntrrvy isyldsihff | |
| 1441 | rprclrtavy heiligyley vkklgyvtgh iwacppsegd dyifhchppd qkipkpkrlq | |
| 1501 | ewykkmldka faeriihdyk difkqatedr ltsakelpyf egdfwpnvle esikeleqee | |
| 1561 | eerkkeesta asettegsqg dsknakkknn kktnknkssi srankkkpsm pnvsndlsqk | |
| 1621 | lyatmekhke vffvihlhag pvintlppiv dpdpllscdl mdgrdafltl ardkhwefss | |
| 1681 | lrrskwstlc mlvelhtqgq drfvytcnec khhvetrwhc tvcedydlci ncyntkshah | |
| 1741 | kmvkwglgld degssqgepq skspqesrrl siqrciqslv hacqcrnanc slpscqkmkr | |
| 1801 | vvqhtkgckr ktnggcpvck qliaiccyha khcqenkcpv pfclnikhkl rqqqiqhrlq | |
| 1861 | qaqlmrrrma tmntrnvpqq slpsptsapp gtptqqpstp qtpqppaqpq pspvsmspag | |
| 1921 | fpsvartqpp ttvstgkpts qvpappppaq pppaaveaar qiereaqqqq hlyrvninns | |
| 1981 | mppgrtgmgt pgsqmapvsl nvprpnqvsg pvmpsmppgq wqqaplpqqq pmpglprpvi | |
| 2041 | smqaqaavag prmpsvqppr sispsalqdl lrtlkspssp qqqqqvlnil ksnpqlmaaf | |
| 2101 | ikqrtakyva nqpgmqpqpg lqsqpgmqpq pgmhqqpslq nlnamqagvp rpgvppqqqa | |
| 2161 | mgglnpqgqa lnimnpghnp nmasmnpqyr emlrrqllqq qqqqqqqqqq qqqqqqgsag | |
| 2221 | maggmaghgq fqqpqgpggy ppamqqqqrm qqhlplqgss mgqmaaqmgq lgqmgqpglg | |
| 2281 | adstpniqqa lqqrilqqqq mkqqigspgq pnpmspqqhm lsgqpqashl pgqqiatsls | |
| 2341 | nqvrspapvq sprpqsqpph sspspriqpq psphhvspqt gsphpglavt massidqghl | |
| 2401 | gnpeqsamlp qlntpsrsal sselslvgdt tgdtlekfve gl | |

[0406] Putative function
[0407] CREB-binding protein, transcription factor

### Example 2

### Category 1

[0408] Line ID—492

[0409] Phenotype—Female sterile, few eggs laid, several fully matured eggs in ovarioles

[0410] Annotated Drosophila genome genomic segment containing P element insertion site (and map position)—AE003490 (11B4-14)

[0411] P element insertion site—30,773

[0412] Annotated Drosophila genome Complete Genome candidate

[0413] CG2028—CK1 alpha (2 splice variants)

(SEQ ID NO:93)

TAAAGTGCAAGCTGGAAAAGAAAAGCAAAACAAATTCCGGAGAGCAGAAA
GAGAGTTTTTCAAGTGAACGCGTCCAACTGTTTTTGAAGCGAAGCGCTTA
GGCGGAGGAGCAGCTAGCCAGGATGGACAAGATGCGGATATTGAAGGAAA
GTCGCCCCGAGATAATCGTCGGTGGCAAATATCGGGTGATCAGGAAGATT
GGAAGCGGATCGTTTGGCGACATTTACCTGGGCATGAGCATCCAGAGCGG
CGAAGAAGTGGCCATCAAGATGGAGAGCGCCCACGCCCGCCATCCGCAGC
TGTTGTACGAGGCCAAGCTGTACCGCATTCTGAGCGGCGGCGTTGGATTC
CCTCGTATACGTCACCATGGCAAGGAAAAGAACTTCAACACCCTGGTCAT
GGACCTGCTGGGACCCTCGCTGGAGGATCTGTTCAATTTCTGTACGCGCC
ATTTCACAATCAAAACGGTTCTGATGCTCGTCGACCAGATGATCGGACGC
TTGGAGTACATCCATCTCAAGTGCTTCATCCATCGCGACATCAAGCCGGA
TAACTTCCTAATGGGCATTGGTCGGCACTGCAATAAGCTGTTCCTGATCG
ATTTCGGTCTGGCCAAGAAGTTCCGCGATCCGCACACGCGCCATCACATC
GTTTACCGCGAGGACAAGAACCTCACCGGCACTGCCCGCTATGCCTCGAT
CAATGCCCATCTGGGCATCGAGCAGTCGCGGCGTGACGACATGGAATCGC
TTGGATACGTGATGATGTACTTCAATCGCGGCGTACTGCCATGGCAAGGC
ATGAAGGCCAACACCAAGCAGCAGAAATACGAGAAGATCTCCGAAAAGAA
GATGTCCACGCCCATCGAGGTCCTCTGCAAGGGCTCGCCGGCCGAGTTCT
CCATGTATCTGAACTATTGTCGTAGCCTGCGCTTCGAGGAGCAGCCAGAT
TACATGTACCTACGTCAATTGTTCCGCATACTGTTCAGAACGCTGAACCA
TCAGTATGACTACATCTACGACTGGACAATGCTGAAGCAGAAGACCCATC
AGGGTCAACCCAATCCAGCTATACTCTTGGAGCAATTGGACAAGGACAAG
GAGAAGCAGAACGGCAAGCCCCTGATCGCGGACTAAGAGCTGCAGCGCAT
TCAGACGAATGGGGGGAGTGCATCAGAGAAGGAGAACGTGGATGCGTGGA
TGTAAATGACGTTGATGTGGGCGAAAGGCCCGGCAAGGAGCGGAGCAAAT
ATGAAACAGACGCAACCGTAAAATTGAGTAACACCAGCGGTCGTCCGAAT
GTTTCTTAATATTAATTTAAATTCAATACTAAACAAATAAGGAACCACAA
ACAAGCAAGCAAC

(SEQ ID NO:94)

MDKMRILKESRPEIIVGGKYRVIRKIGSGSFGDIYLGMSIQSGEEVAIKM
ESAHARHPQLLYEAKLYRILSGGVGFPRIRHHGKEKNFNTLVMDLLGPSL
EDLFNFCTRHFTIKTVLMLVDQMIGRLEYIHLKCFIHRDIKPDNFLMGIG
RHCNKLFLIDFGLAKKFRDPHTRHHIVYREDKNLTGTARYASINAHLGIE
QSRRDDMESLGYVMMYFNRGVLPWQGMKANTKQQKYEKISEKKMSTPIEV
LCKGSPAEFSMYLNYCRSLRFEEQPDYMYLRQLFRILFRTLNHQYDYIYD
WTMLKQKTHQGQPNPAILLEQLDKDKEKQNGKPLIAD

(SEQ ID NO:95)

TTTGGTTGAACCTATCGGGCCCTATCGATATAAGCAAAAGCATTTTTGCT
GGATCTACCATTTTATTTTAGTTAATAAAATACATATATTTCCTCTCTTT
TTGTTCCGTTTGTGCGCGTACAAAACTAGCTGCGAACTCGTGCAATATTT
CATAAACTGAATGGGAAAACAACGATAACGACGAAAGAAAACGAAAACGG
ATCTGCGACGAAATTTTCCCCGTTCCGTTTTTTTTTCTCCACCAGCAGCA
GAAGCAGCAGAGCAAAAGCAGCGAATATATTTGTAAAAGAGAGCCCCAAC
CTTGAGAAAAAACAACCAGCAGGGCAATAATTAGTTGAATTTATCGTCTG
CTGTTTTTCAAGTGAACGCGTCCAACTGTTTTTGAAGCGAAGCGCTTAGG
CGGAGGAGCAGCTAGCCAGGATGGACAAGATGCGGATATTGAAGGAAAGT
CGCCCCGAGATAATCGTCGGTGGCAAATATCGGGTGATCAGGAAGATTGG
AAGCGGATCGTTTGGCGACATTTACCTGGGCATGAGCATCCAGAGCGGCG
AAGAAGTGGCCATCAAGATGGAGAGCGCCCACGCCCGCCATCCGCAGCTG
TTGTACGAGGCCAAGCTGTACCGCATTCTGAGCGGCGGCGTTGGATTCCC
TCGTATACGTCACCATGGCAAGGAAAAGAACTTCAACACCCTGGTCATGG
ACCTGCTGGGACCCTCGCTGGAGGATCTGTTCAATTTCTGTACGCGCCAT
TTCACAATCAAAACGGTTCTGATGCTCGTCGACCAGATGATCGGACGCTT
GGAGTACATCCATCTCAAGTGCTTCATCCATCGCGACATCAAGCCGGATA
ACTTCCTAATGGGCATTGGTCGGCACTGCAATAAGCTGTTCCTGATCGAT
TTCGGTCTGGCCAAGAAGTTCCGCGATCCGCACACGCGCCATCACATCGT
TTACCGCGAGGACAAGAACCTCACCGGCACTGCCCGCTATGCCTCGATCA
ATGCCCATCTGGGCATCGAGCAGTCGCGGCGTGACGACATGGAATCGCTT
GGATACGTGATGATGTACTTCAATCGCGGCGTACTGCCATGGCAAGGCAT
GAAGGCCAACACCAAGCAGCAGAAATACGAGAAGATCTCCGAAAAGAAGA
TGTCCACGCCCATCGAGGTCCTCTGCAAGGGCTCGCCGGCCGAGTTCTCC
ATGTATCTGAACTATTGTCGTAGCCTGCGCTTCGAGGAGCAGCCAGATTA
CATGTACCTACGTCAATTGTTCCGCATACTGTTCAGAACGCTGAACCATC
AGTATGACTACATCTACGACTGGACAATGCTGAAGCAGAAGACCCATCAG
GGTCAACCCAATCCAGCTATACTCTTGGAGCAATTGGACAAGGACAAGGA
GAAGCAGAACGGCAAGCCCCTGATCGCGGACTAAGAGCTGCAGCGCATTC
AGACGAATGGGGGGAGTGCATCAGAGAAGGAGAACGTGGATGCGTGGATG
TAAATGACGTTGATGTGGGCGAAAGGCCCGGCAAGGAGCGGAGCAAATAT
GAAACAGACGCAACCGTAAAATTGAGTAACACCAGCGGTCGTCCGAATGT
TTCTTAATATTAATTTAAATTCAATACTAAACAAATAAGGAACCACAAAC
AAGCAAGCAAC

(SEQ ID NO:96)

MDKMRILKESRPEIIVGGKYRVIRKIGSGSFGDIYLGMSIQSGEEVAIKM
ESAHARHPQLLYEAKLYRILSGGVGFPRIRHHGKEKNFNTLVMDLLGPSL
EDLFNFCTRHFTIKTVLMLVDQMIGRLEYIHLKCFIHRDIKPDNFLMGIG
RHCNKLFLIDFGLAKKFRDPHTRHHIVYREDKNLTGTARYASINAHLGIE
QSRRDDMESLGYVMMYFNRGVLPWQGMKANTKQQKYEKISEKKMSTPIEV
LCKGSPAEFSMYLNYCRSLRFEEQPDYMYLRQLFRILFRTLNHQYDYIYD
WTMLKQKTHQGQPNPAILLEQLDKDKEKQNGKPLIAD

[0414] Human homologue of Complete Genome candidate

[0415] P48729 Casein kinase I, alpha isoform (cki-alpha) (ck1)

| | | |
|---|---|---|
| 1 | ccgcctccgt gttccgtttc ctgccgccct cctctcgtag ccttgcctag tgtggagccc | (SEQ ID NO:97) |
| 61 | caggcctccg tcctcttccc agaggtgtcg aggcttggcc ccagcctcca tcttcgtctc | |
| 121 | tcaggatggc gagtagcagc ggctccaagg ctgaattcat tgtcggtggg aaatataaac | |
| 181 | tggtacggaa gatcgggtct ggctccttcg gggacatcta tttggcgatc aacatcacca | |
| 241 | acggcgagga agtggcactg aagctagaat ctcagaaggc caggcatccc cagttgctgt | |
| 301 | acgagagcaa gctctataag attcttcaag gtggggttgg catcccccac atacggtggt | |
| 361 | atggtcagga aaaagactac aatgtactag tcatggatct tctgggacct agcctcgaag | |
| 421 | acctcttcaa tttctgttca agaaggttca caatgaaaac tgtacttatg ttagctgacc | |
| 481 | agatgatcag tagaattgaa tatgtgcata caaagaattt tatacacaga gacattaaac | |
| 541 | cagataactt cctaatgggt attgggcgtc actgtaataa gttattcctt attgattttg | |
| 601 | gtttggccaa aaagtacaga gacaacagga caaggcaaca cataccatac agagaagata | |
| 661 | aaaacctcac tggcactgcc cgatatgcta gcatcaatgc acatcttggt attgagcaga | |
| 721 | gtcgccgaga tgacatggaa tcattaggat atgttttgat gtattttaat agaaccagcc | |
| 781 | tgccatggca agggctaaag gctgcaacaa agaaacaaaa atatgaaaag attagtgaaa | |
| 841 | agaagatgtc cacgcctgtt gaagttttat gtaaggggtt tcctgcagaa tttgcgatgt | |
| 901 | acttaaacta ttgtcgtggg ctacgctttg aggaagcccc agattacatg tatctgaggc | |
| 961 | agctattccg cattcttttc aggaccctga accatcaata tgactacaca tttgattgga | |
| 1021 | caatgttaaa gcagaaagca gcacagcagg cagcctcttc aagtgggcag ggtcagcagg | |
| 1081 | cccaaacccc cacaggcaag caaactgaca aatccaagag taacatgaaa ggtttctaat | |
| 1141 | ttctaagcat gaattgagga acagaagaag cagacgagat gatcggagca gcatttgttt | |
| 1201 | ctccccaaat ctagaaattt tagttcatat gtacactagc cagtggttgt ggacaacca | |
| 1 | masssgskae fivggkyklv rkigsgsfgd iylainitng eevalklesq karhpqllye | (SEQ ID NO:98) |
| 61 | sklykilqgg vgiphirwyg qekdynvlvm dllgpsledl fnfcsrrftm ktvlmladqm | |
| 121 | isrieyvhtk nfihrdikpd nflmgigrhc nklflidfgl akkyrdnrtr qhipyredkn | |
| 181 | ltgtaryasi nahlgieqsr rddmeslgyv lmyfnrtslp wqglkaatkk qkyekisekk | |
| 241 | mstpvevlck gfpaefamyl nycrglrfee apdymylrql frilfrtlnh qydytfdwtm | |
| 301 | lkqkaaqqaa sssgqgqqaq tptgkqtdks ksnmkgf | |

[0416] Putative function
[0417] Casein kinase

### Example 2A

### Category 1

[0418] Line ID—ccr-a2

[0419] Phenotype—Female semi-sterile, Lays eggs, but arrest before cortical migration

[0420] Annotated Drosophila genome genomic segment containing P element insertion site (and map position)—AE003435 (5C6)

[0421] P element insertion site sequence

(SEQ ID NO:99)
GATCAGACGATATTCGGACTCCAAGCAGAGCACTTTGAAGGTGAGTTCGCCGGAAA
CCAGGCAAAGCGCCATTCGCCATTCAGGCTGCGCAACTGTTGGGAAGGGCGATCGG
TGCGGGCCTCTTCGCTATTACGCCAGCTGGCGAAAGGGGGATGTGCTGCAAGGCGA
TTAAGTTGGGTAACGCCAGGGTTTTCCCAGTCACGACGTTGTAAAACGACGGCCAGT
GCCAAGCTCTGCTGCTCTAAACGACGCATTTCGTACTCCAAAGTACGAATTTTTTCCC
TCAAGCTCTTATTTTCATTAAACAATGAACAGGACCTAACGCCACAGTA

[0422] Annotated Drosophila genome Complete Genome candidate

[0423] CG3011—glycine hydroxymethyltransferase

(SEQ ID NO:100)

GTAAATGTTGTTTACCAACGTAACGCGTGTTTTCGCTTCGTTGTATTTTC
GGTGTCGAATATTTTGGATGCTGGCCAAGAGATAGCGCAGCGATCGGGTC
GGAACTCTTGGGCGGACTTATCACTGGGTCGGTCAGGGGTCACGGGTTAT
CGTTATCGCTTATCAGCCAGCGGCGGCGTCATCTCAGCGCCGGCGACTCT
TCTCACTTTGCGGCAGTTCCGATTCGAACGCAGCCGTTTACAAAGACATG
CAGCGGGCGCGCTCTACACTGACACAAAAGCTTCGGTTTTGCCTTAGTCG
GGACCTGAACACCAAAGTTGGCAACCCGGTTAACTTCGAGACTGGAAAGC
TTAGCGGAGCTTTAACTCGCATCGCCGCCAAAAAACAACCATCACCAACG
CCATTCTTACCGGCGATCAGACGATATTCGGACTCCAAGCAGAGCACTTT
GAAGAATATGGCCGATCAGAAACTGCTGCAAACCCCGCTGGCACAGGGCG
ATCCGGAGCTGGCCGAGCTGATCAAGAAGGAGAAGGAGCGCCAGCGCGAA
GGACTCGAGATGATCGCCAGTGAGAACTTCACCTCGGTGGCGGTTCTCGA
GAGCCTGAGCTCCTGCCTGACCAACAAGTACTCCGAGGGATATCCCGGCA
AGAGGTACTACGGTGGCAACGAGTACATCGACCGCATAGAGCTGCTCGCC
CAGCAACGCGGACGCGAGCTGTTCAACCTGGACGATGAGAAGTGGGGCGT
TAATGTGCAGCCTTATTCCGGATCCCCGGCCAATCTGGCTGTCTACACGG
GCGTCTGCCGGCCCCACGATCGCATCATGGGCCTGGATCTGCCCGATGGC
GGTCACTTGACGCACGGTTTCTTCACGCCCACCAAGAAGATATCGGCCAC
ATCGATCTTCTTCGAGAGCATGCCGTACAAAGTGAACCCGGAGACGGGCA
TCATCGATTACGATAAGTTGGCGGAGGCGGCGAAGAATTTCCGGCCGCAG
ATCATCATTGCTGGCATATCGTGCTACTCCCGTCTGCTGGACTATGCGCG
TTTCCGACAGATTTGCGATGATGTGGGCGCCTACCTGATGGCCGACATGG
CCCATGTGGCGGGCATTGTGGCCGCGGGATTGATACCATCGCCGTTCGAA
TGGGCCGACATTGTGACCACCACCACGCACAAGACACTGCGAGGTCCGCG
CGCCGGCGTGATCTTCTTCCGCAAGGGCGTGCGCAGCACCAAGGCCAATG
GAGACAAGGTACTCTACGATCTGGAGGAGCGCATCAACCAGGCGGTGTTT
CCATCACTCCAGGGTGGTCCGCACAACAACGCCGTGGCTGGCATTGCCAC
CGCCTTCAAGCAGGCCAAGAGTCCCGAATTCAAGGCCTACCAGACGCAGG
TGCTCAAGAATGCCAAGGCCCTGTGCGATGGCCTCATTTCGCGAGGCTAT
CAGGTGGCCACCGGCGGCACCGACGTCCATTTGGTGCTGGTCGATGTGCG
TAAGGCTGGCCTGACCGGCGCCAAGGCCGAGTACATCCTCGAGGAGGTGG
GCATCGCGTGCAACAAGAACACTGTGCCCGGCGACAAGTCCGCCATGAAT
CCCTCCGGCATCCGGCTGGGCACACCGGCCCTGACCACTCGCGGCCTTGC
CGAGCAGGACATCGAGCAGGTGGTGGCCTTCATCGATGCTGCCCTAAAGG
TTGGCGTCCAGGCAGCCAAGCTGGCCGGCAGTCCCAAGATAACCGATTAC
CACAAGACGCTGGCCGAGAATGTGGAGCTCAAGGCCCAGGTGGACGAGAT
CCGCAAGAATGTGGCCCAGTTCAGCAGGAAATTCCCGCTGCCCGGCCTGG
AGACCCTGTAG

(SEQ ID NO:101)

MQRARSTLTQKLRFCLSRDLNTKVGNPVNFETGKLSGALTRIAAKKQPSP
TPFLPAIRRYSDSKQSTLKNMADQKLLQTPLAQGDPELAELIKKEKERQR
EGLEMIASENFTSVAVLESLSSCLTNKYSEGYPGKRYYGGNEYIDRIELL
AQQRGRELFNLDDEKWGVNVQPYSGSPANLAVYTGVCRPHDRIMGLDLPD
GGHLTHGFFTPTKKISATSIFFESMPYKVNPETGIIDYDKLAEAAKNFRP
QIIIAGISCYSRLLDYARFRQICDDVGAYLMADMAHVAGIVAAGLIPSPF
EWADIVTTTTHKTLRGPRAGVIFFRKGVRSTKANGDKVLYDLEERINQAV
FPSLQGGPHNNAVAGIATAFKQAKSPEFKAYQTQVLKNAKALCDGLISRG
YQVATGGTDVHLVLVDVRKAGLTGAKAEYILEEVGIACNKNTVPGDKSAM
NPSGIRLGTPALTTRGLAEQDIEQVVAFIDAALKVGVQAAKLAGSPKITD
YHKTLAENVELKAQVDEIRKNVAQFSRKFPLPGLETL

[0424] Human homologue of Complete Genome candidate

[0425] AAA63258—serine hydroxymethyltransferase

| | | |
|---|---|---|
| 1 | ggcacgaggc ctgcgacttc cgagttgcga tgctgtactt ctctttgttt tgggcggctc | (SEQ ID NO:102) |
| 61 | ggcctctgca gagatgtggg cagctggtca ggatggccat tcgggctcag cacagcaacg | |
| 121 | cagcccagac tcagactggg gaagcaaaca ggggctggac aggccaggag agcctgtcgg | |
| 181 | acagtgatcc tgagatgtgg gagttgctgc agagggagaa ggacaggcag tgtcgtggcc | |
| 241 | tggagctcat tgcctcagag aacttctgca gccgagctgc gctggaggcc ctggggtcct | |
| 301 | gtctgaacaa caagtactcg gagggttatc ctggcaagag atactatggg ggagcagagg | |
| 361 | tggtggatga aattgagctg ctgtgccagc gccgggcctt ggaagccttt gacctggatc | |
| 421 | ctgcacagtg gggagtcaat gtccagccct actccgggtc cccagccaac ctggccgtct | |
| 481 | acacagccct tctgcaacct cacgaccgga tcatggggct ggacctgccc gatgggggcc | |
| 541 | agtgatctca cccacggcta catgtctgac gtcaagcgga tatcagccac gtccatcttc | |
| 601 | ttcgagtcta tgccctataa gctcaacccc aaaactggcc tcattgacta caaccagctg | |
| 661 | gcactgactg ctcgactttt ccggccacgg ctcatcatag ctggcaccag cgcctatgct | |
| 721 | cgcctcattg actacgcccg catgagagag gtgtgtgatg aagtcaaagc acacctgctg | |
| 781 | gcagacatgg cccacatcag tggcctggtg gctgccaagg tgattccctc gcctttcaag | |
| 841 | cacgcggaca tcgtcaccac cactactcac aagactcttc gaggggccag gtcagggctc | |
| 901 | atcttctacc ggaaaggggt gaaggctgtg gaccccaaga ctggccggga gatcccttac | |
| 961 | acatttgagg accgaatcaa ctttgccgtg ttcccatccc tgcagggggg cccccacaat | |
| 1021 | catgccattg ctgcagtagc tgtggcccta aagcaggcct gcacccccat gttccgggag | |
| 1081 | tactccctgc aggttctgaa gaatgctcgg gccatggcag atgccctgct agagcgaggc | |
| 1141 | tactcactgg tatcaggtgg tactgacaac cacctggtgc tggtggacct gcggcccaag | |
| 1201 | ggcctggatg gagctcgggc tgagcgggtg ctagagcttg tatccatcac tgccaacaag | |
| 1261 | aacacctgtc ctggagaccg aagtgccatc acaccgggcg gcctgcggct tggggcccca | |
| 1321 | gccttaactt ctcgacagtt ccgtgaggat gacttccgga gagttgtgga ctttatagat | |
| 1381 | gaaggggtca acattggctt agaggtgaag agcaagactg ccaagctcca ggatttcaaa | |
| 1441 | tccttcctgc ttaaggactc agaaacaagt cagcgtctgg ccaacctcag gcaacgggtg | |
| 1501 | gagcagtttg ccagggcctt ccccatgcct ggttttgatg agcattgaag gcacctggga | |
| 1561 | aatgaggccc acagactcaa agttactctc cttcccccta cctgggccag tgaaatagaa | |
| 1621 | agcctttcta ttttttggtg cgggagggaa gacctctcac ttagggcaag agccaggtat | |
| 1681 | agtctccctt cccagaattt gtaactgaga agatcttttc tttttccttt ttttggtaac | |
| 1741 | aagacttaga aggagggccc aggcactttc tgtttgaacc cctgtcatga tcacagtgtc | |
| 1801 | agagacgcgt cctctttctt ggggaagttg aggagtgccc ttcagagcca gtagcaggca | |
| 1861 | ggggtgggta ggcaccctcc ttcctgtttt tatctaataa aatgctaacc tgcaaaaaaa | |
| 1921 | aaaaaaaaaa a | |
| 1 | aaqtqtgean rgwtgqesls dsdpemwell qrekdrqcrg leliasenfc sraalealgs | (SEQ ID NO:103) |
| 61 | clnnkysegy pgkryyggae vvdeiellcq rraleafdld paqwgvnvqp ysgspanlav | |
| 121 | ytallqphdr imgldlpdgg hlthgymsdv krisatsiff esmpyklnpk tglidynqla | |
| 181 | ltarlfrprl iiagtsayar lidyarmrev cdevkahlla dmahisglva akvipspfkh | |
| 241 | adivtttthk tlrgarsgli fyrkgvkavd pktgreilyt fedrinfavf pslqggphnh | |
| 301 | aiaavavalk qactpmfrey slqvlknara madallergy slvsggtdnh lvlvdlrpkg | |
| 361 | ldgaraervl elvsitankn tcpgdrsait pgglrlgapa ltsrqfredd frrvvdfide | |
| 421 | gvniglevks ktaklqdfks fllkdsetsq rlanlrqrve qfarafpmpg fdeh | |

[0426] Putative function
[0427] hydroxymethyltransferase

### Example 2B

### Category 1

[0428] Line ID—ewv-b

[0429] Phenotype—Female sterile, No eggs laid. Fully mature eggs, but “retained eggs” phenotype. Also has a mitotic phenotype: higher mitotic index, uneven chromosome staining, tangled and badly defined chromosomes with frequent bridges

[0430] Annotated Drosophila genome genomic segment containing P element insertion site (and map position)—AE003486 (10D4-6)

[0431] P element insertion site sequence

| (SEQ ID NO:104) | |
|---|---|
| | GACAGGAGCAGCTCGGAACGGACAGGAAAAGCAGGAGACTAAACAGTAAGCAATA |
| | AATTGATTTGGCGTATAGTAGCTTACACCAAAGTACATATATTGCCGCATATATAGC |
| | CAGCCGGTCACTTGCGGATCAGCCAACGTCCTGGGCCCCAAGGCGATAGATACCAC |
| | GATAAGGAGATACAGCGATACCACCAATCATTAGCAGGCGACAACGACACATCCGC |
| | ATCCGCAGAAGATGTCCAACGGCAAGGCGACGGTCTCGTTCTTCGAGACCGGGAGC |
| | ACCAAACAGTTCGAGTACTGCTACCAGCTCTATCCCCAGGTTCTTAAGCTAAAGGCC |
| | GAGAAGCGCAACTGTTGGGAAGGGCGATCGGTGCGGGCCTCTTCGCTATTACGCCA |
| | GCTGGCGAAAGGGGGATGTGCTGCAAGGCGATTAAGTTGGGTAACGCCAGGGTTTT |
| | CCCAGNCACGACGNTGNAAAACGACGGNCANNGCCANNCTNTGNTGNTNTAAACN |
| | ACNCATT |

[0432] Annotated Drosophila genome Complete Genome candidate

[0433] CG2446 (2 transcripts)—encodes a novel protein which may be a glycosylation/membrane protein

(SEQ ID NO:105)

AGATAGAACGACAACTCCTGTTCCCGGTTCGTCGTCGTTCGTCATTCCCA
TATTCGCTTCTCGTATTCCCTCCCATTCCCATTCGCAATCCCAATTCCCA
ATTCCCGTCACACGAGTTAGCAGCACATCGCACAGCTGCATCGCTCCGCT
CCGATCCTTTTTAATTTTTTGTTGTGCCTTCGGTGGCGTGCTCATTTCGA
GAACAGAGTAACCCCTTTTTATTTGTCAGTTGTCAACGGCGCCCCTGCAG
GCAGAAAGCAGAAACTGAAACAGCAGAGGAAGAAGAAGAAGCAGCACAGC
ACGGGCACAGCACGAAGCACGCAGCACAGCACAAGCACAGAGGCGAAGCG
AAGCAAAGCAAAGCAGAGGCAACACAGAAAAACAGCAAAGCATTGGAGTA
GTTGTTTGGATGTGGACGGAAAGGAAGACTGGCGGCGACTAACTAAAAGC
AGTACGTTGACAGGAGCAGCTCGGAACGGACAGGAAAAGCAGGAGACTAA
ACACCAGCCGGTCACTTGCGGATCAGCCAACGTCCTGGGCCCCAAGGCGA
TAGATACCACGATAAGGAGATACAGCGATACCACCAATCATTAGCAGGCG
ACAACGACACATCCGCATCCGCAGAAGATGTCCAACGGCAAGGCGACGGT
CTCGTTCTTCGAGACCGGGAGCACCAAACAGTTCGAGTACTGCTACCAGC
TCTATCCCCAGGTTCTTAAGCTAAAGGCCGAGAAGCGCTGCAAGAAGCCG
CAAGAGCTGATCCGCCTGGATCAGTGGTATCAGAATGAACTGCCCAAATT
GATTAAGGCACGCGGCAAGGACGCGCATATGGTATACGATGAGCTCGTCC
AGTCGATGAAGTGGAAGCAGTCGCGCGGCAAATTCTATCCGCAGCTATCC
TACCTGGTCAAGGTCAACACACCGCGCGCCGTCATCCAGGAGACAAAGAA
GGCCTTCCGCAAGCTGCCCAATCTGGAGCAGGCGATCACAGCTTTATCGA
ACCTCAAGGGCGTTGGCACCACAATGGCCAGTGCACTGCTGGCAGCCGCA
GCTCCCGATTCGGCACCATTCATGGCCGACGAGTGCCTGATGGCCATACC
AGAGATCGAGGGCATCGATTACACCACCAAGGAGTACCTCAACTTCGTCA
ATCACATTCAGGCCACCGTGGAGCGCCTCAATGCGGAGGTGGGCGGGGAT
ACGCCGCACTGGTCGCCTCATCGCGTGGAGCTGGCCCTCTGGTCACACTA
TGTGGCCAATGATCTCAGTCCCGAGATGCTCGACGATATGCCGCCGCCTG
GATCCGGCGCCTCCACTGGCACCGGTTCACTCAGCACAAACGGCAACAGC
AGCAAGGTGCTCGATGGCGACGATACCAACGATGGTGTGGGTGTTGATTT
GGACGACGAAAGCCAAGGAGCAGGCGGTCGCAACACTGCTACAGAATCGG
AGACAGAGAATGAGAACACCAACCCGGCTGCTCTGACGCCTCTACAGTCG
GGCGAGGCCAAGAACAACGCAGCTGCCGTTGGCGCCGCCCTGCAGGACGG
TGACTCCAACTTTGTTTCGAACGATTCCACCTCCCAGGAGCCGATCATCG
ATGACAACGATGGCACCACACAGACAACGGCCACCACTTCCACAGAGGAC
GGTGAGCCCATCGCCCTAGACATTGGCATTGGCATCGGTTCGAGTGGAAC
ACCGCTCGCCTCGGACTCTGAAAGCAATCAGGAGGCGCCGCCCAAGACCA
ACAGCCTGCCCATCCTGACTCCCACACAGCACTCGAGCCAGAATCAGAAT
CAAAAGCAGTCGCCGAGCCAGCCCCACAAAACTAACAATTCGATCACCAA
CAACGGTCAGCCTGCTCCTTTGGCAGAAGAGGAAGCGGTTACAGCAGCAC
CACAGCCAGCCAGCAAAGCGACTGCAGCACCAGCCAATGGAAATGGTAAC
GGGAACGGCGTCCTGGGCGACGAGGATGAGGATGAGGCGGAGGACGAGGA
GGAAGATGAGCTGGACGAGGAGGAGGATAATGAGGCGGAGCTAGAGGCTG
ACGAGAGCAATAGCAGCAACGGCATTGTGAGGGACAGTAAACTGCAGCAG
CTGGCGGCGAACAAGGCGGTGGATGCGGTTTCACCGGTAGCAGCGGGTGC
AGACTCGGCACCAGCCATTGGACAGAAGCGTACTGCCCTGCACTGCGATA
TGGAGCTGAAGAACGCCGGCGGAGTGGGTGTGGGCGTGGGGGAGAAGTCA
CCGGATCTAAAGAAACTGCGCAGCGAATGA

(SEQ ID NO:106)

MSNGKATVSFFETGSTKQFEYCYQLYPQVLKLKAEKRCKKPQELIRLDQW
YQNELPKLIKARGKDAHMVYDELVQSMKWKQSRGKFYPQLSYLVKVNTPR
AVIQETKKAFRKLPNLEQAITALSNLKGVGTTMASALLAAAAPDSAPFMA
DECLMAIPEIEGIDYTTKEYLNFVNHIQATVERLNAEVGGDTPHWSPHRV
ELALWSHYVANDLSPEMLDDMPPPGSGASTGTGSLSTNGNSSKVLDGDDT
NDGVGVDLDDESQGAGGRNTATESETENENTNPAALTPLQSGEAKNNAAA
VGAALQDGDSNFVSNDSTSQEPIIDDNDGTTQTTATTSTEDGEPIALDIG
IGIGSSGTPLASDSESNQEAPPKTNSLPILTPTQHSSQNQNQKQSPSQPH
KTNNSITNNGQPAPLAEEEAVTAAPQPASKATAAPANGNGNGNGVLGDED
EDEAEDEEEDELDEEEDNEAELEADESNSSNGIVRDSKLQQLAANKAVDA
VSPVAAGADSAPAIGQKRTALHCDMELKNAGGVGVGVGEKSPDLKKLRSE

(SEQ ID NO:107)

GCCTGTCAGTTTGACTGTGTGAGTGCATGGCGGACTAAAAAGAACCCGAC
GACAGCACTGTAAAAATTCGATTTGTGTGCTGTGCAAACGGCGGCGGAAG
CGAGCAGATTTTTGGCAAATAGTGAGCGATTATCGGATTGAGTAAATACA
ACAAACAACAGAGACACGGCCGCAGCAGCAGCAGCATTAACACAGTACGT
TGACAGGAGCAGCTCGGAACGGACAGGAAAAGCAGGAGACTAAACACCAG
CCGGTCACTTGCGGATCAGCCAACGTCCTGGGCCCCAAGGCGATAGATAC
CACGATAAGGAGATACAGCGATACCACCAATCATTAGCAGGCGACAACGA
CACATCCGCATCCGCAGAAGATGTCCAACGGCAAGGCGACGGTCTCGTTC
TTCGAGACCGGGAGCACCAAACAGTTCGAGTACTGCTACCAGCTCTATCC
CCAGGTTCTTAAGCTAAAGGCCGAGAAGCGCTGCAAGAAGCCGCAAGAGC
TGATCCGCCTGGATCAGTGGTATCAGAATGAACTGCCCAAATTGATTAAG
GCACGCGGCAAGGACGCGCATATGGTATACGATGAGCTCGTCCAGTCGAT
GAAGTGGAAGCAGTCGCGCGGCAAATTCTATCCGCAGCTATCCTACCTGG
TCAAGGTCAACACACCGCGCGCCGTCATCCAGGAGACAAAGAAGGCCTTC
CGCAAGCTGCCCAATCTGGAGCAGGCGATCACAGCTTTATCGAACCTCAA
GGGCGTTGGCACCACAATGGCCAGTGCACTGCTGGCAGCCGCAGCTCCCG
ATTCGGCACCATTCATGGCCGACGAGTGCCTGATGGCCATACCAGAGATC
GAGGGCATCGATTACACCACCAAGGAGTACCTCAACTTCGTCAATCACAT
TCAGGCCACCGTGGAGCGCCTCAATGCGGAGGTGGGCGGGGATACGCCGC
ACTGGTCGCCTCATCGCGTGGAGCTGGCCCTCTGGTCACACTATGTGGCC
AATGATCTCAGTCCCGAGATGCTCGACGATATGCCGCCGCCTGGATCCGG
CGCCTCCACTGGCACCGGTTCACTCAGCACAAACGGCAACAGCAGCAAGG
TGCTCGATGGCGACGATACCAACGATGGTGTGGGTGTTGATTTGGACGAC
GAAAGCCAAGGAGCAGGCGGTCGCAACACTGCTACAGAATCGGAGACAGA
GAATGAGAACACCAACCCGGCTGCTCTGACGCCTCTACAGTCGGGCGAGG
CCAAGAACAACGCAGCTGCCGTTGGCGCCGCCCTGCAGGACGGTGACTCC
AACTTTGTTTCGAACGATTCCACCTCCCAGGAGCCGATCATCGATGACAA
CGATGGCACCACACAGACAACGGCCACCACTTCCACAGAGGACGGTGAGC
CCATCGCCCTAGACATTGGCATTGGCATCGGTTCGAGTGGAACACCGCTC
GCCTCGGACTCTGAAAGCAATCAGGAGGCGCCGCCCAAGACCAACAGCCT
GCCCATCCTGACTCCCACACAGCACTCGAGCCAGAATCAGAATCAAAAGC
AGTCGCCGAGCCAGCCCCACAAAACTAACAATTCGATCACCAACAACGGT
CAGCCTGCTCCTTTGGCAGAAGAGGAAGCGGTTACAGCAGCACCACAGCC
AGCCAGCAAAGCGACTGCAGCACCAGCCAATGGAAATGGTAACGGGAACG
GCGTCCTGGGCGACGAGGATGAGGATGAGGCGGAGGACGAGGAGGAAGAT
GAGCTGGACGAGGAGGAGGATAATGAGGCGGAGCTAGAGGCTGACGAGAG
CAATAGCAGCAACGGCATTGTGAGGGACAGTAAACTGCAGCAGCTGGCGG
CGAACAAGGCGGTGGATGCGGTTTCACCGGTAGCAGCGGGTGCAGACTCG
GCACCAGCCATTGGACAGAAGCGTACTGCCCTGCACTGCGATATGGAGCT
GAAGAACGCCGGCGGAGTGGGTGTGGGCGTGGGGGAGAAGTCACCGGATC
TAAAGAAACTGCGCAGCGAATGA

(SEQ ID NO:108)

MSNGKATVSFFETGSTKQFEYCYQLYPQVLKLKAEKRCKKPQELIRLDQW
YQNELPKLIKARGKDAHMVYDELVQSMKWKQSRGKFYPQLSYLVKVNTPR
AVIQETKKAFRKLPNLEQAITALSNLKGVGTTMASALLAAAAPDSAPFMA
DECLMAIPEIEGIDYTTKEYLNFVNHIQATVERLNAEVGGDTPHWSPHRV
ELALWSHYVANDLSPEMLDDMPPPGSGASTGTGSLSTNGNSSKVLDGDDT
NDGVGVDLDDESQGAGGRNTATESETENENTNPAALTPLQSGEAKNNAAA
VGAALQDGDSNFVSNDSTSQEPIIDDNDGTTQTTATTSTEDGEPIALDIG
IGIGSSGTPLASDSESNQEAPPKTNSLPILTPTQHSSQNQNQKQSPSQPH
KTNNSITNNGQPAPLAEEEAVTAAPQPASKATAAPANGNGNGNGVLGDED
EDEAEDEEEDELDEEEDNEAELEADESNSSNGIVRDSKLQQLAANKAVDA
VSPVAAGADSAPAIGQKRTALHCDMELKNAGGVGVGVGEKSPDLKKLRSE

[0434] Human homologue of Complete Genome candidate
[0435] CG2446—none

[0436] Putative function
[0437] glycosylation/membrane protein

### Example 2C

### Category 1

[0438] Line ID—fs(1)06

[0439] Phenotype—Female sterile (semi-sterile), 2-3 fully matured eggs seen in each of the ovarioles

[0440] Annotated Drosophila genome genomic segment containing P element insertion site (and map position)—AE003449 (9B6-7)

[0441] P element insertion site sequence

| (SEQ ID NO:109) | |
|---|---|
| | CTNCATGNTGNAGGAGACAAGGCGTTCTATATTATATAGNNGATTTTNNTGTATATA |
| | AAGGAAGANCTGNGCTAANGNAANAGGCATCTCGATGANTTTNATAATNAGGGCAA |
| | NTGGTANNAANGGTTTATGCCAAAGTATTACACACCAGGGNTGGGCACAACAGATC |
| | TTAACTNANNATAGGNNATTGGNATAANCTTAAATTTGTAAGATTNTGNAATAATAT |
| | AGTAGAGANNNTCAATACGCATTANTAATNGTGACGATCCCNAGCATAAACTCAAA |
| | AAAANCTTATANTTTTATAAAGGCNANNCCNNACTAANNAATTAAANGAANNNCNG |
| | NCGCCNCNAAANGATGATTGNGCTATATAANNANANNATTGATNGAGGCACTTATA |
| | TTATTATAATTAAAACACTTAATTATTNTGTGTGAAATGATTGCACTNNNNATTGGG |
| | CNAGAGCCTNNNNCGTATTGANANNNNNNNATTTNGGCTNNANCTGTAAATATCNT |
| | ACAAACTCGTNATTGCTAAATAACTTTTGTATNCCCCNCTGGTCACTCTGACTTAAA |
| | CGTNNTTCGNNAAAACAGCGGCTGATCACTGANGTTTTCTCCCGNNTTTCGCTNTCA |
| | ANCCGAANTANAAACAGGNGAANNTCCCNGATAATTTGNGGNNTANCCCACTGATC |
| | ACAGNGCCCNNGGATNNNCAAGGAANNGCGATCGAAACCCGNCCTGGNGNAACAC |
| | NNTTTCCC |

[0442] Annotated Drosophila genome Complete Genome candidate

[0443] CG2968—hydrogen transporting ATP synthase

(SEQ ID NO:110)

CAAAAACAGCGGCTGATCACTGAAGTTTTCTCGTGTTTTTCGCTATCAAA
CCGAAATAAAAACAGCCCAAAATGTCCTTCGTTAAGAACGCCCGTTTGCT
GGCCGCCCGCGGCGCTCGCTTGGCCCAGAACCGCAGCTACTCGGATGAGA
TGAAGCTGACCTTCGCCGCCGCCAACAAAACCTTCTACGATGCCGCTGTG
GTGCGCCAAATCGATGTGCCTTCCTTCTCGGGATCCTTCGGCATCCTGGC
CAAGCACGTGCCCACTCTGGCTGTCCTGAAGCCCGGCGTTGTCCAGGTGG
TGGAAAACGATGGCAAGACCCTCAAGTTCTTCGTCTCCAGCGGTTCCGTC
ACCGTCAACGAGGATTCCTCCGTTCAGGTTCTGGCCGAGGAGGCCCACAA
CATCGAGGACATCGATGCCAATGAGGCGCGCCAGCTGCTCGCGAAATACC
AGTCACAGCTTAGCTCCGCTGGCGACGACAAGGCCAAGGCCCAGGCTGCC
ATTGCCGTGGAGGTCGCCGAAGCGTTAGTCAAGGCTGCCGAATAGACGTA
ATCACCACACAACCGCCACCAATAAACCACAATCGATGCTTTGTGTCTGA
AATAAATAAAAAACATAACGATCACCTTAAAAAGCCAGAGAGTTATGAAA
CAATAAAAAAGCGA

(SEQ ID NO:111)

MSFVKNARLLAARGARLAQNRSYSDEMKLTFAAANKTFYDAAVVRQIDVP
SFSGSFGILAKHVPTLAVLKPGVVQVVENDGKTLKFFVSSGSVTVNEDSS
VQVLAEEAHNIEDIDANEARQLLAKYQSQLSSAGDDKAKAQAAIAVEVAE
ALVKAAE

[0444] Human homologue of Complete Genome candidate

[0445] CAA45016—H(+)-transporting ATP synthase, delta-subunit of the human mitochondrial ATP synthase complex

| | | |
|---|---|---|
| 1 | gtcctcctcg ccctccaggc cgcccgcgcc gcgccggagt ccgctgtccg ccagctaccc | (SEQ ID NO:112) |
| 61 | gcttcctgcc gcccgccgct gccatgctgc ccgccgcgct gctccgccgc ccgggacttg | |
| 121 | gccgcctcgt ccgccacgcc cgtgcctatg ccgaggccgc cgccgccccg gctgccgcct | |
| 181 | ctggccccaa ccagatgtcc ttcaccttcg cctctcccac gcaggtgttc ttcaacggtg | |
| 241 | ccaacgtccg gcaggtggac gtgcccacgc tgaccggagc cttcggcatc ctggcggccc | |
| 301 | acgtgcccac gctgcaggtc ctgcggccgg ggctggtcgt ggtgcatgca gaggacggca | |
| 361 | ccacctccaa atactttgtg agcagcggtt ccatcgcagt gaacgccgac tcttcggtgc | |
| 421 | agttgttggc cgaagaggcc gtgacgctgg acatgttgga cctgggggca gccaaggcaa | |
| 481 | acttggagaa ggcccaggcg gagctggtgg ggacagctga cgaggccacg cgggcagaga | |
| 541 | tccagatccg aatcgaggcc aacgaggccc tggtgaaggc cctggagtag gcggtgcgta | |
| 601 | cccggtgtcc cgaggcccgg ccaggggctg ggcagggatg ccaggtgggc ccagccagct | |
| 661 | cctggggtcc cggccacctg gggaagccgc gcctgccaag gaggccacca gagggcagtg | |
| 721 | caggcttctg cctgggcccc aggccctgcc tgtgttgaaa gctctgggga ctgggccagg | |
| 781 | gaagctcctc ctcagctttg agctgtggct gccacccatg gggctctcct tccgcctctc | |
| 841 | aagatccccc cagcctgacg ggccgcttac catcccctct gccctgcaga gccagccgcc | |
| 901 | aaggttgacc tcagcttcgg agccacctct ggatgaactg cccccagccc ccgccccatt | |
| 961 | aaagacccgg aagcctgaaa aaaaaaaaaa aaaa | |
| 1 | mlpaallrrp glgrlvrhar ayaeaaaapa aasgpnqmsf tfasptqvff nganvrqvdv | (SEQ ID NO:113) |
| 61 | ptltgafgil aahvptlqvl rpglvvvhae dgttskyfvs sgsiavnads svqllaeeav | |
| 121 | tldmldlgaa kanlekaqae lvgtadeatr aeiqiriean ealvkale | |

[0446] Putative function
[0447] hydrogen transporting ATP synthase

### Category 2—Male Steriles

### Example 3

### Category 2

[0448] Line ID—167

[0449] Phenotype—lethal phase pharate adult, cytokinesis defect.
[0450] Some onion stage cysts with large nebenkerns

[0451] Annotated Drosophila genome genomic segment containing P element insertion site (and map position)—AE003428 (3F4-5)

[0452] P element insertion site—293,654

[0453] Annotated Drosophila genome Complete Genome candidate

[0454] CG2829—BcDNA:GH07910 tousled kinase (2 splice variants)

(SEQ ID NO:114)

AGTTTCATTCGGGGATGCTTGGCCTATCGCAAGGAGGATCGCATGGATGT
GTTCGCACTGGCCAGGCACGAGTACATTCAGCCACCGATACCGAAACATG
GGCGCGGTTCGCTCAATCAGCAACAGCAGGCGCAACAACAGCAGCAGCAA
CAACAGCAACAGCAGCAGCAACAGTCGTCGACGTCACAGGCCAATTCTAC
AGGCCAGACATCTTTCTCTGCCCACATGTTTGGCAATATGAATCAGTCGA
GTTCGTCCTAGATGAGAGCGACTGCAAAAAAATCGGAATAAACACGGTTA
TAATATATAAGTACAAATAAACCATATATATGTGTTTATGTTATGTATAT
ATACATAAAGGAAAATAACAAGGCAAATGTGAAAATTAGTGCAAACTGAA
CGAAAAGACAAAAATAAAACAAAAGGAAACCCAAATGTGATAATATTGTA
ATATAATGTGAAAAGCAAAACACACACAAATACACAACTCACGCACTTAG
CCACGTATGTGTGTGCAGAAAAATATGCGGCGCTTAAAAAAGATGTCCCC
CGGCGCCCATTTGCAGATGTCCCCGCAGAACACTTCGTCCCTAAGTCAAC
ACCATCCACATCAACAGCAACAGTTACAACCCCCACAGCAGCAACAACAG
CATTTCCCTAACCATCACAGCGCCCAGCAACAGTCGCAGCAGCAGCAGCA
ACAGGAGCAACAGAATCCCCAGCAGCAGGCGCAACAGCAGCAGCAGATAC
TCCCACATCAACATTTGCAGCACCTGCACAAGCATCCGCATCAGCTGCAA
CTGCATCAGCAGCAGCAACAACAACTCCACCAGCAACAGCAGCAACACTT
CCACCAGCAGTCGCTGCAAGGGCTGCATCAGGGTAGCAGCAATCCGGATT
CGAATATGAGCACTGGCTCCTCGCATAGCGAGAAGGATGTCAATGATATG
CTGAGTGGCGGTGCAGCAACGCCAGGAGCTGCAGCAGCAGCGATTCAACA
GCAACATCCCGCCTTTGCGCCCACACTGGGAATGCAGCAACCACCGCCGC
CCCCACCTCAACACTCCAATAATGGAGGCGAGATGGGCTACTTGTCGGCA
GGCACGACCACGACGACGTCGGTGTTAACGGTAGGCAAGCCTCGGACGCC
AGCGGAGCGGAAACGGAAGCGAAAAATGCCTCCATGTGCCACTAGTGCGG
ATGAGGCGGGGAGTGGCGGTGGCTCTGGCGGAGCAGGAGCAACCGTTGTT
AACAACAGCAGCCTGAAGGGCAAATCATTGGCCTTTCGTGATATGCCCAA
GGTAAACATGAGCCTGAATCTGGGCGATCGTCTGGGAGGATCTGCAGGAA
GCGGAGTAGGAGCCGGTGGCGCCGGAAGCGGGGGAGGTGGCGCTGGTTCC
GGTTCTGGAAGCGGTGGCGGCAAAAGCGCCCGCCTGATGCTGCCAGTCAG
CGACAACAAGAAGATCAACGACTATTTCAATAAGCAGCAAACGGGCGTGG
GCGTCGGTGTGCCAGGTGGTGCGGGAGGCAATACCGCTGGCCTTCGAGGA
TCACATACGGGAGGTGGCAGCAAGTCACCCTCATCCGCCCAGCAGCAGCA
AACGGCGGCACAGCAGCAGGGAAGCGGTGTTGCGACGGGAGGCAGTGCAG
GCGGTTCCGCTGGCAACCAGGTGCAAGTGCAAACGAGCAGCGCTTACGCC
CTTTACCCACCAGCTAGTCCCCAAACCCAGACGTCACAGCAACAGCAGCA
GCAGCAACCGGGATCAGACTTTCACTATGTCAACTCCAGCAAGGCGCAGC
AACAACAGCAGCGTCAACAGCAACAGACTTCCAATCAAATGGTTCCTCCA
CACGTGGTCGTTGGCCTTGGTGGTCATCCACTGAGCCTCGCGTCCATTCA
GCAGCAGACGCCCTTATCCCAGCAGCAACAGCAGCAACAACAGCAGCAGC
AACAGCAGCAACTGGGACCACCGACCACATCGACGGCCTCCGTCGTGCCA
ACGCATCCGCATCAACTCGGATCCCTGGGAGTTGTTGGGATGGTCGGTGT
GGGTGTTGGCGTGGGCGTTGGAGTAAATGTGGGTGTGGGACCACCACTGC
CACCACCACCGCCGATGGCCATGCCAGCGGCCATTATCACTTATAGTAAG
GCCACTCAAACGGAGGTGTCGCTGCATGAATTGCAGGAGCGCGAAGCGGA
GCACGAATCGGGCAAGGTGAAGCTAGACGAGATGACACGGCTGTCCGATG
AACAAAAGTCCCAAATTGTTGGCAACCAGAAGACGATTGACCAGCACAAG
TGCCACATAGCCAAGTGTATTGATGTGGTCAAGAAGCTGTTGAAGGAGAA
GAGCAGCATCGAGAAGAAGGAGGCGCGACAGAAGTGCATGCAGAATCGCC
TCAGGCTCGGACAGTTTGTTACCCAACGAGTGGGCGCCACATTCCAGGAG
AACTGGACGGACGGCTATGCGTTCCAGGAGCTGAGTCGGCGGCAAGAAGA
AATAACCGCTGAGCGTGAAGAGATAGATCGGCAGAAAAAGCAGCTGATGA
AAAAGCGTCCGGCGGAGTCCGGACGCAAGCGCAACAACAACAGTAACCAG
AACAACCAGCAGCAGCAGCAACAGCAACACCAGCAACAGCAGCAGCAACA
AAATTCCAACTCGAACGATTCCACGCAGCTGACGAGCGGAGTTGTTACCG
GTCCAGGCAGTGATCGTGTGAGCGTAAGCGTCGACAGCGGATTGGGTGGC
AATAATGCGGGCGCGATCGGTGGCGGAACCGTTGGTGGTGGCGTTGGAGG
TGGTGGTGTTGGAGGCGGTGGTGTCGGAGGCGGCGGTGGACGTGGACTTT
CTCGCAGCAATTCGACGCAGGCCAATCAGGCTCAATTGCTGCACAACGGC
GGTGGTGGTTCGGGCGGCAATGTCGGCAACTCGGGCGGCGTTGGCGACCG
CTTGTCAGATCGAGGAGGAGGAGGTGGCGGCATCGGCGGAAACGATAGCG
GCAGCTGCTCGGACTCGGGCACTTTCCTGAAGCCAGACCCCGTATCGGGT
GCCTACACAGCGCAGGAGTATTACGAGTACGATGAGATCCTCAAGTTGCG
ACAAAATGCCCTCAAAAAGGAGGACGCCGACCTGCAGCTGGAGATGGAGA
AGCTGGAGCGGGAGCGCAATCTGCACATCCGAGAGCTCAAGCGGATTCTT
AACGAGGATCAGTCCCGCTTTAACAATCATCCCGTGCTGAATGATCGCTA
TCTTCTGTTGATGCTCCTGGGCAAGGGCGGCTTCTCAGAGGTCCACAAGG
CCTTCGACCTGAAGGAGCAACGCTATGTCGCATGTAAGGTGCACCAATTA
AACAAGGATTGGAAGGAGGATAAGAAAGCTAATTATATCAAACACGCTTT
GCGGGAATACAACATTCACAAGGCACTGGATCATCCGCGGGTCGTCAAGC
TATACGATGTCTTCGAGATCGATGCGAATTCCTTTTGCACAGTGCTCGAA
TACTGTGATGGCCACGATCTGGACTTCTATTTGAAGCAACATAAGACTAT
ACCCGAGCGTGAAGCGCGCTCGATAATAATGCAGGTTGTATCTGCACTCA
AGTATCTAAATGAGATTAAGCCTCCAGTTATCCACTACGATCTGAAGCCC
GGCAACATTCTGCTTACCGAGGGCAACGTCTGCGGCGAGATTAAGATCAC
CGACTTCGGTCTGTCAAAGGTGATGGACGACGAGAATTACAATCCCGATC
ACGGCATGGATCTGACCTCTCAGGGGGCGGGAACCTACTGGTATCTGCCA
CCCGAGTGCTTTGTCGTGGGCAAAAATCCGCCGAAAATCTCCTCCAAAGT
GGACGTATGGAGTGTGGGTGTTATCTTCTACCAGTGTCTGTACGGCAAAA
AGCCCTTCGGTCACAATCAGTCGCAGGCCACGATTCTCGAGGAGAATACG
ATCCTGAAGGCCACCGAAGTGCAGTTCTCCAACAAGCCAACCGTTTCTAA
CGAGGCCAAG

(SEQ ID NO:115)

MCVQKNMRRLKKMSPGAHLQMSPQNTSSLSQHHPHQQQQLQPPQQQQQHF
PNHHSAQQQSQQQQQQEQQNPQQQAQQQQQILPHQHLQHLHKHPHQLQLH
QQQQQQLHQQQQQHFHQQSLQGLHQGSSNPDSNMSTGSSHSEKDVNDMLS
GGAATPGAAAAAIQQQHPAFAPTLGMQQPPPPPPQHSNNGGEMGYLSAGT
TTTTSVLTVGKPRTPAERKRKRKMPPCATSADEAGSGGGSGGAGATVVNN
SSLKGKSLAFRDMPKVNMSLNLGDRLGGSAGSGVGAGGAGSGGGGAGSGS
GSGGGKSARLMLPVSDNKKINDYFNKQQTGVGVGVPGGAGGNTAGLRGSH
TGGGSKSPSSAQQQQTAAQQQGSGVATGGSAGGSAGNQVQVQTSSAYALY
PPASPQTQTSQQQQQQQPGSDFHYVNSSKAQQQQQRQQQQTSNQMVPPHV
VVGLGGHPLSLASIQQQTPLSQQQQQQQQQQQQQQLGPPTTSTASVVPTH
PHQLGSLGVVGMVGVGVGVGVGVNVGVGPPLPPPPPMAMPAAIITYSKAT
QTEVSLHELQEREAEHESGKVKLDEMTRLSDEQKSQIVGNQKTIDQHKCH
IAKCIDVVKKLLKEKSSIEKKEARQKCMQNRLRLGQFVTQRVGATFQENW
TDGYAFQELSRRQEEITAEREEIDRQKKQLMKKRPAESGRKRNNNSNQNN
QQQQQQQHQQQQQQQNSNSNDSTQLTSGVVTGPGSDRVSVSVDSGLGGNN
AGAIGGGTVGGGVGGGGVGGGGVGGGGGRGLSRSNSTQANQAQLLHNGGG
GSGGNVGNSGGVGDRLSDRGGGGGGIGGNDSGSCSDSGTFLKPDPVSGAY
TAQEYYEYDEILKLRQNALKKEDADLQLEMEKLERERNLHIRELKRILNE
DQSRFNNHPVLNDRYLLLMLLGKGGFSEVHKAFDLKEQRYVACKVHQLNK
DWKEDKKANYIKHALREYNIHKALDHPRVVKLYDVFEIDANSFCTVLEYC
DGHDLDFYLKQHKTIPEREARSIIMQVVSALKYLNEIKPPVIHYDLKPGN
ILLTEGNVCGEIKITDFGLSKVMDDENYNPDHGMDLTSQGAGTYWYLPPE
CFVVGKNPPKISSKVDVWSVGVIFYQCLYGKKPFGHNQSQATILEENTIL
KATEVQFSNKPTVSNEAK

(SEQ ID NO:116)

AGTTTCATTCGGGGATGCTTGGCCTATCGCAAGGAGGATCGCATGGATGT
GTTCGCACTGGCCAGGCACGAGTACATTCAGCCACCGATACCGAAACATG
GGCGCGGTTCGCTCAATCAGCAACAGCAGGCGCAACAACAGCAGCAGCAA
CAACAGCAACAGCAGCAGCAACAGTCGTCGACGTCACAGGCCAATTCTAC
AGGCCAGACATCTTTCTCTGCCCACATGTTTGGCAATATGAATCAGTCGA
GTTCGTCCTAGTGGTGTCGGTGTCGTTTTGGTTTTGTCGGCGGTTGCTAA
ACACAATTTAAGTTCACTCGGTTAGCAGACATTACACACTGCCTGCTCTC
ATACATATTTACGCACTTGTATATACATGCAATGTGCCTGTGTGTGCGCA
AGAAACCAGAAAAAACGAAAAGTACAACATTCGTTGAGTCGCGTTCGGCT
TAATTTTTTTTTGTGTTACCGTGTGTGTGTTTGTGCTTTGGATTTGCCAA
TTTTAGCCGACTGGCTCTCAGTGTCGAACTTAAACTTAAAGAGCGAGCAA
CGTGACGTGTCGCCCAGTGTCGCTTAAAATTCGCGCACACAACTTCCTAC
TACAAAAAAACGAAAGAAAGAAGGAGAAAAAACGTTAAAGATGTCCCCCG
GCGCCCATTTGCAGATGTCCCCGCAGAACACTTCGTCCCTAAGTCAACAC
CATCCACATCAACAGCAACAGTTACAACCCCCACAGCAGCAACAACAGCA
TTTCCCTAACCATCACAGCGCCCAGCAACAGTCGCAGCAGCAGCAGCAAC
AGGAGCAACAGAATCCCCAGCAGCAGGCGCAACAGCAGCAGCAGATACTC
CCACATCAACATTTGCAGCACCTGCACAAGCATCCGCATCAGCTGCAACT
GCATCAGCAGCAGCAACAACAACTCCACCAGCAACAGCAGCAACACTTCC
ACCAGCAGTCGCTGCAAGGGCTGCATCAGGGTAGCAGCAATCCGGATTCG
AATATGAGCACTGGCTCCTCGCATAGCGAGAAGGATGTCAATGATATGCT
GAGTGGCGGTGCAGCAACGCCAGGAGCTGCAGCAGCAGCGATTCAACAGC
AACATCCCGCCTTTGCGCCCACACTGGGAATGCAGCAACCACCGCCGCCC
CCACCTCAACACTCCAATAATGGAGGCGAGATGGGCTACTTGTCGGCAGG
CACGACCACGACGACGTCGGTGTTAACGGTAGGCAAGCCTCGGACGCCAG
CGGAGCGGAAACGGAAGCGAAAAATGCCTCCATGTGCCACTAGTGCGGAT
GAGGCGGGGAGTGGCGGTGGCTCTGGCGGAGCAGGAGCAACCGTTGTTAA
CAACAGCAGCCTGAAGGGCAAATCATTGGCCTTTCGTGATATGCCCAAGG
TAAACATGAGCCTGAATCTGGGCGATCGTCTGGGAGGATCTGCAGGAAGC
GGAGTAGGAGCCGGTGGCGCCGGAAGCGGGGGAGGTGGCGCTGGTTCCGG
TTCTGGAAGCGGTGGCGGCAAAAGCGCCCGCCTGATGCTGCCAGTCAGCG
ACAACAAGAAGATCAACGACTATTTCAATAAGCAGCAAACGGGCGTGGGC
GTCGGTGTGCCAGGTGGTGCGGGAGGCAATACCGCTGGCCTTCGAGGATC
ACATACGGGAGGTGGCAGCAAGTCACCCTCATCCGCCCAGCAGCAGCAAA
CGGCGGCACAGCAGCAGGGAAGCGGTGTTGCGACGGGAGGCAGTGCAGGC
GGTTCCGCTGGCAACCAGGTGCAAGTGCAAACGAGCAGCGCTTACGCCCT
TTACCCACCAGCTAGTCCCCAAACCCAGACGTCACAGCAACAGCAGCAGC
AGCAACCGGGATCAGACTTTCACTATGTCAACTCCAGCAAGGCGCAGCAA
CAACAGCAGCGTCAACAGCAACAGACTTCCAATCAAATGGTTCCTCCACA
CGTGGTCGTTGGCCTTGGTGGTCATCCACTGAGCCTCGCGTCCATTCAGC
AGCAGACGCCCTTATCCCAGCAGCAACAGCAGCAACAACAGCAGCAGCAA
CAGCAGCAACTGGGACCACCGACCACATCGACGGCCTCCGTCGTGCCAAC
GCATCCGCATCAACTCGGATCCCTGGGAGTTGTTGGGATGGTCGGTGTGG
GTGTTGGCGTGGGCGTTGGAGTAAATGTGGGTGTGGGACCACCACTGCCA
CCACCACCGCCGATGGCCATGCCAGCGGCCATTATCACTTATAGTAAGGC
CACTCAAACGGAGGTGTCGCTGCATGAATTGCAGGAGCGCGAAGCGGAGC
ACGAATCGGGCAAGGTGAAGCTAGACGAGATGACACGGCTGTCCGATGAA
CAAAAGTCCCAAATTGTTGGCAACCAGAAGACGATTGACCAGCACAAGTG
CCACATAGCCAAGTGTATTGATGTGGTCAAGAAGCTGTTGAAGGAGAAGA
GCAGCATCGAGAAGAAGGAGGCGCGACAGAAGTGCATGCAGAATCGCCTC
AGGCTCGGACAGTTTGTTACCCAACGAGTGGGCGCCACATTCCAGGAGAA
CTGGACGGACGGCTATGCGTTCCAGGAGCTGAGTCGGCGGCAAGAAGAAA
TAACCGCTGAGCGTGAAGAGATAGATCGGCAGAAAAAGCAGCTGATGAAA
AAGCGTCCGGCGGAGTCCGGACGCAAGCGCAACAACAACAGTAACCAGAA
CAACCAGCAGCAGCAGCAACAGCAACACCAGCAACAGCAGCAGCAACAAA
ATTCCAACTCGAACGATTCCACGCAGCTGACGAGCGGAGTTGTTACCGGT
CCAGGCAGTGATCGTGTGAGCGTAAGCGTCGACAGCGGATTGGGTGGCAA
TAATGCGGGCGCGATCGGTGGCGGAACCGTTGGTGGTGGCGTTGGAGGTG
GTGGTGTTGGAGGCGGTGGTGTCGGAGGCGGCGGTGGACGTGGACTTTCT
CGCAGCAATTCGACGCAGGCCAATCAGGCTCAATTGCTGCACAACGGCGG
TGGTGGTTCGGGCGGCAATGTCGGCAACTCGGGCGGCGTTGGCGACCGCT
TGTCAGATCGAGGAGGAGGAGGTGGCGGCATCGGCGGAAACGATAGCGGC
AGCTGCTCGGACTCGGGCACTTTCCTGAAGCCAGACCCCGTATCGGGTGC
CTACACAGCGCAGGAGTATTACGAGTACGATGAGATCCTCAAGTTGCGAC
AAAATGCCCTCAAAAAGGAGGACGCCGACCTGCAGCTGGAGATGGAGAAG
CTGGAGCGGGAGCGCAATCTGCACATCCGAGAGCTCAAGCGGATTCTTAA
CGAGGATCAGTCCCGCTTTAACAATCATCCCGTGCTGAATGATCGCTATC
TTCTGTTGATGCTCCTGGGCAAGGGCGGCTTCTCAGAGGTCCACAAGGCC
TTCGACCTGAAGGAGCAACGCTATGTCGCATGTAAGGTGCACCAATTAAA
CAAGGATTGGAAGGAGGATAAGAAAGCTAATTATATCAAACACGCTTTGC
GGGAATACAACATTCACAAGGCACTGGATCATCCGCGGGTCGTCAAGCTA
TACGATGTCTTCGAGATCGATGCGAATTCCTTTTGCACAGTGCTCGAATA
CTGTGATGGCCACGATCTGGACTTCTATTTGAAGCAACATAAGACTATAC
CCGAGCGTGAAGCGCGCTCGATAATAATGCAGGTTGTATCTGCACTCAAG
TATCTAAATGAGATTAAGCCTCCAGTTATCCACTACGATCTGAAGCCCGG
CAACATTCTGCTTACCGAGGGCAACGTCTGCGGCGAGATTAAGATCACCG
ACTTCGGTCTGTCAAAGGTGATGGACGACGAGAATTACAATCCCGATCAC
GGCATGGATCTGACCTCTCAGGGGGCGGGAACCTACTGGTATCTGCCACC
CGAGTGCTTTGTCGTGGGCAAAAATCCGCCGAAAATCTCCTCCAAAGTGG
ACGTATGGAGTGTGGGTGTTATCTTCTACCAGTGTCTGTACGGCAAAAAG
CCCTTCGGTCACAATCAGTCGCAGGCCACGATTCTCGAGGAGAATACGAT
CCTGAAGGCCACCGAAGTGCAGTTCTCCAACAAGCCAACCGTTTCTAACG
AGGCCAAG

(SEQ ID NO:117)

MSPGAHLQMSPQNTSSLSQHHPHQQQQLQPPQQQQQHFPNHHSAQQQSQQ
QQQQEQQNPQQQAQQQQQILPHQHLQHLHKHPHQLQLHQQQQQQLHQQQQ
QHFHQQSLQGLHQGSSNPDSNMSTGSSHSEKDVNDMLSGGAATPGAAAAA
IQQQHPAFAPTLGMQQPPPPPPQHSNNGGEMGYLSAGTTTTTSVLTVGKP
RTPAERKRKRKMPPCATSADEAGSGGGSGGAGATVVNNSSLKGKSLAFRD
MPKVNMSLNLGDRLGGSAGSGVGAGGAGSGGGGAGSGSGSGGGKSARLML
PVSDNKKINDYFNKQQTGVGVGVPGGAGGNTAGLRGSHTGGGSKSPSSAQ
QQQTAAQQQGSGVATGGSAGGSAGNQVQVQTSSAYALYPPASPQTQTSQQ
QQQQQPGSDFHYVNSSKAQQQQQRQQQQTSNQMVPPHVVVGLGGHPLSLA
SIQQQTPLSQQQQQQQQQQQQQQLGPPTTSTASVVPTHPHQLGSLGVVGM
VGVGVGVGVGVNVGVGPPLPPPPPMAMPAAIITYSKATQTEVSLHELQER
EAEHESGKVKLDEMTRLSDEQKSQIVGNQKTIDQHKCHIAKCIDVVKKLL
KEKSSIEKKEARQKCMQNRLRLGQFVTQRVGATFQENWTDGYAFQELSRR
QEEITAEREEIDRQKKQLMKKRPAESGRKRNNNSNQNNQQQQQQQHQQQQ
QQQNSNSNDSTQLTSGVVTGPGSDRVSVSVDSGLGGNNAGAIGGGTVGGG
VGGGGVGGGGVGGGGGRGLSRSNSTQANQAQLLHNGGGGSGGNVGNSGGV
GDRLSDRGGGGGGIGGNDSGSCSDSGTFLKPDPVSGAYTAQEYYEYDEIL
KLRQNALKKEDADLQLEMEKLERERNLHIRELKRILNEDQSRFNNHPVLN
DRYLLLMLLGKGGFSEVHKAFDLKEQRYVACKVHQLNKDWKEDKKANYIK
HALREYNIHKALDHPRVVKLYDVFEIDANSFCTVLEYCDGHDLDFYLKQH
KTIPEREARSIIMQVVSALKYLNEIKPPVHIYDLKPGNILLTEGNVCGEI
KITDFGLSKVMDDENYNPDHGMDLTSQGAGTYWYLPPECFVVGKNPPKIS
SKVDVWSVGVIFYQCLYGKKPFGHNQSQATILEENTILKATEVQFSNKPT
VSNEAK

[0455] Human homologue of Complete Genome candidate

[0456] AAF03095—tousled-like kinase2

| | | |
|---|---|---|
| 1 | ccgggcgggg ggttgcggcg ctcaggagag gccccggctc cgccccgggc ctgcccaggg | (SEQ ID NO:118) |
| 61 | ggagagcgga gctccgcagc cgggtcgggt cggggcccct cccgggagga gcgtggagcg | |
| 121 | cggcggcggc ggcggcagca gaaatgatgg aagaattgca tagcctggac ccacgacggc | |
| 181 | aggaattatt ggaggccagg tttactggag taggtgttag taagggacca cttaatagtg | |
| 241 | agtcttccaa ccagagcttg tgcagcgtcg gatccttgag tgataaagaa gtagagactc | |
| 301 | ccgagaaaaa gcagaatgac cagcgaaatc ggaaaagaaa agctgaacca tatgaaacta | |
| 361 | gccaagggaa aggcactcct aggggacata aaattagtga ttactttgag tttgctgggg | |
| 421 | gaagcgcgcc aggaaccagc cctggcagaa gtgttccacc agttgcacga tcctcaccgc | |
| 481 | aacattcctt atccaatccc ttaccgcgac gagtagaaca gcccctctat ggtttagatg | |
| 541 | gcagtgctgc aaaggaggca acggaggagc agtctgctct gccaaccctc atgtcagtga | |
| 601 | tgctagcaaa acctcggctt gacacagagc agctggcgca aaggggagct ggcctctgct | |
| 661 | tcacttttgt ttcagctcag caaaacagtc cctcatctac gggatctggc aacacagagc | |
| 721 | attcctgcag ctcccaaaaa cagatctcca tccagcacag acggacccag tccgacctca | |
| 781 | caatagaaaa aatatctgca ctagaaaaca gtaagaattc tgacttagag aagaaggagg | |
| 841 | gaagaataga tgatttatta agagccaact gtgatttgag acggcagatt gatgaacagc | |
| 901 | aaaagatgct agagaaatac aaggaacgat taaatagatg tgtgacaatg agcaagaaac | |
| 961 | tccttataga aaagtcaaaa caagagaaga tggcgtgtag agataagagc atgcaagacc | |
| 1021 | gcttgagact gggccacttt actactgtcc gacacggagc ctcatttact gaacagtgga | |
| 1081 | cagatggtta tgcttttcag aatcttatca agcaacagga aaggataaat tcacagaggg | |
| 1141 | aagagataga aagacaacgg aaaatgttag caaagcggaa acctcctgcc atgggtcagg | |
| 1201 | cccctcctgc aaccaatgag cagaaacagc ggaaaagcaa gaccaatgga gctgaaaatg | |
| 1261 | aaacgttaac gttagcagaa taccatgaac aagaagaaat cttcaaactc agattaggtc | |
| 1321 | atcttaaaaa ggaggaagca gagatccagg cagagctgga gagactagaa agggttagaa | |
| 1381 | atctacatat cagggaacta aaaaggatac ataatgaaga taattcacaa tttaaagatc | |
| 1441 | atccaacgct aaatgacaga tatttgttgt tacatctttt gggtagagga ggtttcagtg | |
| 1501 | aagtttacaa ggcatttgat ctaacagagc aaagatacgt agctgtgaaa attcaccagt | |
| 1561 | taaataaaaa ctggagagat gagaaaaagg agaattacca caagcatgca tgtagggaat | |
| 1621 | accggattca taaagagctg gatcatccca gaatagttaa gctgtatgat tacttttcac | |
| 1681 | tggatactga ctcgttttgt acagtattag aatactgtga gggaaatgat ctggacttct | |
| 1741 | acctgaaaca gcacaaatta atgtcggaga aagaggcccg gtccattatc atgcagattg | |
| 1801 | tgaatgcttt aaagtactta aatgaaataa aacctcccat catacactat gacctcaaac | |
| 1861 | caggtaatat tcttttagta aatggtacag cgtgtggaga gataaaaatt acagattttg | |
| 1921 | gtctttcgaa gatcatggat gatgatagct acaattcagt ggatggcatg gagctaacat | |
| 1981 | cacaaggtgc tggtacttat tggtatttac caccagagtg ttttgtggtt gggaaagaac | |
| 2041 | caccaaagat ctcaaataaa gttgatgtgt ggtcggtggg tgtgatcttc tatcagtgtc | |
| 2101 | tttatggaag gaagcctttt ggccataacc agtctcagca agacatccta caagagaata | |
| 2161 | cgattcttaa agctactgaa gtgcagttcc cgccaaagcc agtagtaaca cctgaagcaa | |
| 2221 | aggcgtttat tcgacgatgc ttggcctacc gaaagaggga ccgcattgat gtccagcagc | |
| 2281 | tggcctgtga tccctacttg ttgcctcaca tccgaaagtc agtctctaca agtagccctg | |
| 2341 | ctggagctgc tattgcatca acctctgggg cgtccaataa cagttcttct aattgagact | |
| 2401 | gactccaagg ccacaaactg ttcaacacac acaaagtgga caaatggcgt tcagcagcgg | |
| 2461 | gtttggaaca tagcgaatcc gaatggatct gatgaaacct gtaccaggtg cttttatttt | |
| 2521 | cttgcttttt tcccatccat agagcatgac agcatcgatt ctcattgagg agaaaccttg | |
| 2581 | ggcagctccg gccaggcctt gtaggaaaag gccccgcccg aggttccagc gtcaacggcc | |
| 2641 | actgtgtgtg gctgctctga gtgaggaaaa aattaaaaag aaaaactggt tccatgtact | |
| 2701 | gtgaacttga aaacttgcag actcaggggg gtccctgatg cagtgcttca gatgaagaat | |
| 2761 | gtggacttga aaatacagac tgggctagtc cagtgtctat atttaaactt gttcttttct | |
| 2821 | tttaataaag tttaggtaac atctcctgaa aagcttgtag cacaaaggct cagctgggga | |
| 2881 | tggtgtttga cttcggagga aaaaagttgc tattgcccgt taaaggcact agagttagtg | |
| 2941 | ttttatccct aaataatttc aatttttaaa aacatgcagc ttccctctcc ccttttttat | |
| 3001 | ttttgaaaga atacatttgg tcataaagtg aaacccgtat tagcaagtac gaggcaatgt | |
| 3061 | tcattccaat cagatgcagc tttctcctcc gtctggtctc ctgtttgcaa ttgcttccct | |
| 3121 | catctcagta gggaaaaaat tgagtgggag tactgagatg tgtgggtttt tgccattgga | |
| 3181 | caaagaatga ggttagaaga ctgcagcttg gagtctctct aggttttcaa ctatttcttc | |
| 3241 | acaatttgaa cacttgacgg ttgtcccttt taatttattt gaagtgctat ttttttaaat | |
| 3301 | aaaggttcat ctgtccatgc aaaaaaa | |
| 1 | meelhsldpr rqellearft gvgvskgpln sessnqslcs vgslsdkeve tpekkqndqr | (SEQ ID NO:119) |
| 61 | nrkrkaepye tsqgkgtprg hkisdyfefa ggsapgtspg rsvppvarss pqhslsnplp | |
| 121 | rrveqplygl dgsaakeate eqsalptlms vmlakprldt eqlaqrgagl cftfvsaqqn | |
| 181 | spsstgsgnt ehscssqkqi siqhrrtqsd ltiekisale nsknsdlekk egriddllra | |
| 241 | ncdlrrqide qqkmlekyke rlnrcvtmsk klliekskqe kmacrdksmq drlrlghftt | |
| 301 | vrhgasfteq wtdgyafqnl ikqqerinsq reeierqrkm lakrkppamg qappatneqk | |
| 361 | qrksktngae netltlaeyh eqeeifklrl ghlkkeeaei qaelerlerv mlhirelkr | |
| 421 | ihnednsqfk dhptlndryl llhllgrggf sevykafdlt eqryvavkih qlnknwrdek | |
| 481 | kenyhkhacr eyrihkeldh privklydyf sldtdsfctv leycegndld fylkqhklms | |
| 541 | ekearsiimq ivnalkylne ikppiihydl kpgnillvng tacgeikitd fglskimddd | |
| 601 | synsvdgmel tsqgagtywy lppecfvvgk eppkisnkvd vwsvgvifyq clygrkpfgh | |
| 661 | nqsqqdilqe ntilkatevq fppkpvvtpe akafirrcla yrkrdridvq qlacdpyllp | |
| 721 | hirksvstss pagaaiasts gasnnsssn | |

[0457] Putative function
[0458] Serine threonine kinase involved in replication and cell cycle

### Example 4

### Category 2

[0459] Line ID—224

[0460] Phenotype—Semi-lethal male and female, cytokinesis defect. Onion stage cysts have variable sized Nebenkerns. Also has a mitotic phenotype: Tangled unevenly condensed chromosomes, anaphases with lagging chromosomes and bridges

[0461] Annotated Drosophila genome genomic segment containing P element insertion site (and map position)—AE003450 (9C)

[0462] P element insertion site—139,674

[0463] Annotated Drosophila genome Complete Genome candidate

[0464] CG2096—flapwing, phosphatase type 1

(SEQ ID NO:120)

ATCTGTAAGTGAAGTCCACTAACAACCGGTTTACTTGCAGTGCGCAGCTG
CCGAACGGGCAAACAGGTCCAGATGACGGAGGCGGAGGTGCGTGGCCTCT
GTCTCAAGTCGCGCGAGATCTTCTTGCAACAGCCCATCCTGCTGGAACTG
GAGGCACCGCTGATCATCTGCGGCGACATCCACGGCCAGTACACAGACCT
GTTGCGCCTGTTCGAGTACGGCGGATTCCCTCCGGCTGCCAACTACTTGT
TCCTCGGCGACTACGTCGATCGGGGCAAGCAGTCCCTGGAGACCATCTGT
CTGCTGCTGGCCTACAAGATCAAATATCCGGAGAACTTCTTCTTGTTGCG
CGGCAACCACGAGTGCGCCAGTATTAATAGGATTTACGGCTTCTACGATG
AGTGCAAGCGCCGATACAATGTCAAACTGTGGAAGACTTTCACAGATTGC
TTCAACTGTCTGCCGGTAGCCGCCATTATTGACGAAAAGATCTTCTGCTG
CCACGGCGGCCTCAGTCCCGATCTTCAGGGCATGGAGCAGATCCGTCGCC
TAATGCGACCCACAGATGTGCCGGATACCGGGTTACTGTGCGATCTTCTG
TGGAGTGATCCCGACAAGGATGTTCAGGGTTGGGGCGAGAATGATCGCGG
TGTGAGCTTCACCTTCGGTGTGGATGTGGTCTCCAAGTTTTTGAACCGCC
ACGAGCTGGACTTGATCTGCCGTGCACATCAGGTTGTGGAGGATGGCTAT
GAGTTCTTTGCGCGTCGGCAACTGGTCACGTTGTTCTCGGCGCCCAATTA
CTGTGGAGAGTTCGACAATGCCGGCGGAATGATGACCGTGGACGACACGC
TGATGTGCTCATTCCAGATCCTGAAACCATCCGAGAAGAAGGCCAAGTAT
CTGTACAGCGGAATGAACTCGTCGCGACCCACAACACCGCAGCGCAGCGC
CCCAATGCTTGCGACCAACAAGAAGAAATAATATATCCATCCGCTTCCAT
TTCCTTAAAGGTTCAACAAACAACAGAAATAAACTTTTACATAGATACAC
ACATATATACATATAAATATAACGAAACGATAGAAAAGGAGAGCGTTAGG
CGATAGTAGAGAAAGGGCAAATGATAAATTAAATGTGTGAGCTATTAAAG
CAAGCAAAATCGAAGTGCATGAATATCAACATCTATGTGAATCCGTCATT
ATCTGTTATCTGATGTGTCATCTGTATCCAACTTGATTACCTTATCCGTG
TACCTGCTAGTTGCAGCAGCAACATCAGGAGCAACAACACCAGCAGCAGC
AGCAGCAGAAACATCAGTGAAACACTCAGAGGCCCATAGTTAAGTCGATT
CCTGCATTTGATGATTATCTGTTGAATGGAAATTGTGACAACGTCCCCGT
AACAGCAGCTCCCAGATCCAAAACTCCCGAAACATGCAGATAAATAAATA
CATTAAAAGTACAGCGATGTTAAGCAATGAATTTATATATAGGCTTATTA
ATGTAAACT

(SEQ ID NO:121)

MTEAEVRGLCLKSREIFLQQPILLELEAPLIICGDIHGQYTDLLRLFEYG
GFPPAANYLFLGDYVDRGKQSLETICLLLAYKIKYPENFFLLRGNHECAS
INRIYGFYDECKRRYNVKLWKTFTDCFNCLPVAAIIDEKIFCCHGGLSPD
LQGMEQIRRLMRPTDVPDTGLLCDLLWSDPDKDVQGWGENDRGVSFTFGV
DVVSKFLNRHELDLICRAHQVVEDGYEFFARRQLVTLFSAPNYCGEFDNA
GGMMTVDDTLMCSFQILKPSEKKAKYLYSGMNSSRPTTPQRSAPMLATNK
KK

[0465] Human homologue of Complete Genome candidate

[0466] NP_{—}002700 protein phosphatase 1, catalytic subunit, beta isoform

| | | |
|---|---|---|
| 1 | cctgggtctg acgcggccct gttcgagggg gcctctcttg tttatttatt tattttccgt | (SEQ ID NO:122) |
| 61 | gggtgcctcc gagtgtgcgc gcgctctcgc tacccggcgg ggagggggtg gggggagggc | |
| 121 | ccgggaaaag ggggagttgg agccggggtc gaaacgccgc gtgacttgta ggtgagagaa | |
| 181 | cgccgagccg tcgccgcagc ctccgccgcc gagaagccct tgttcccgct gctgggaagg | |
| 241 | agagtctgtg ccgacaagat ggcggacggg gagctgaacg tggacagcct catcacccgg | |
| 301 | ctgctggagg tacgaggatg tcgtccagga aagattgtgc agatgactga agcagaagtt | |
| 361 | cgaggcttat gtatcaagtc tcgggagatc tttctcagcc agcctattct tttggaattg | |
| 421 | gaagcaccgc tgaaaatttg tggagatatt catggacaat atacagattt actgagatta | |
| 481 | tttgaatatg gaggtttccc accagaagcc aactatcttt tcttaggaga ttatgtggac | |
| 541 | agaggaaagc agtctttgga aaccatttgt ttgctattgg cttataaaat caaatatcca | |
| 601 | gagaacttct ttctcttaag aggaaaccat gagtgtgcta gcatcaatcg catttatgga | |
| 661 | ttctatgatg aatgcaaacg aagatttaat attaaattgt ggaagacctt cactgattgt | |
| 721 | tttaactgtc tgcctatagc agccattgtg gatgagaaga tcttctgttg tcatggagga | |
| 781 | ttgtcaccag acctgcaatc tatggagcag attcggagaa ttatgagacc tactgatgtc | |
| 841 | cctgatacag gtttgctctg tgatttgcta tggtctgatc cagataagga tgtgcaaggc | |
| 901 | tggggagaaa atgatcgtgg tgtttccttt acttttggag ctgatgtagt cagtaaattt | |
| 961 | ctgaatcgtc atgatttaga tttgatttgt cgagctcatc aggtggtgga agatggatat | |
| 1021 | gaattttttg ctaaacgaca gttggtaacc ttattttcag ccccaaatta ctgtggcgag | |
| 1081 | tttgataatg ctggtggaat gatgagtgtg gatgaaactt tgatgtgttc atttcagata | |
| 1141 | ttgaaaccat ctgaaaagaa agctaaatac cagtatggtg gactgaattc tggacgtcct | |
| 1201 | gtcactccac ctcgaacagc taatccgccg aagaaaaggt gaagaaagga attctgtaaa | |
| 1261 | gaaaccatca gatttgttaa ggacatactt cataatatat aagtgtgcac tgtaaaacca | |
| 1321 | tccagccatt tgacaccctt tatgatgtca cacctttaac ttaaggagac gggtaaagga | |
| 1381 | tcttaaattt ttttctaata gaaagatgtg ctacactgta ttgtaataag tatactctgt | |
| 1441 | tatagtcaac aaagttaaat ccaaattcaa aattatccat taaagttaca tcttcatgta | |
| 1501 | tcacaatttt taaagttgaa aagcatccca gttaaactag atgtgatagt taaaccagat | |
| 1561 | gaaagcatga tgatccatct gtgtaatgtg gttttagtgt tgcttggttg tttaattatt | |
| 1621 | ttgagcttgt tttgtttttg tttgttttca ctagaataat ggcaaatact tctaattttt | |
| 1681 | ttccctaaac atttttaaaa gtgaaatatg ggaagagctt tacagacatt caccaactat | |
| 1741 | tattttccct tgtttatcta cttagatatc tgtttaatct tactaagaaa actttcgcct | |
| 1801 | cattacatta aaaaggaatt ttagagattg attgttttaa aaaaaaatac gcacattgtc | |
| 1861 | caatccagtg attttaatca tacagtttga ctgggcaaac tttacagctg atagtgaata | |
| 1921 | ttttgcttta tacaggaatt gacactgatt tggatttgtg cactctaatt tttaacttat | |
| 1981 | tgatgctcta ttgtgcagta gcatttcatt taagataagg ctcatatagt attacccaac | |
| 2041 | tagttggtaa tgtgattatg tggtaccttg gctttaggtt ttcattcgca cggaacacct | |
| 2101 | tttggcatgc ttaacttcct ggtaacacct tcacctgcat tggttttctt tttctttttt | |
| 2161 | ctttcttttt tttttttttt ttttttttga gttgttgttt gtttttagat ccacagtaca | |
| 2221 | tgagaatcct tttttgacaa gccttggaaa gctgacactg tctctttttc ctccctctat | |
| 2281 | acgaaggatg tatttaaatg aatgctggtc agtgggacat tttgtcaact atgggtattg | |
| 2341 | ggtgcttaac tgtctaatat tgccatgtga atgttgtata cgattgtaag gcttatgtca | |
| 2401 | ctaaagattt ttattctgat tttttcataa tcaaaggtca tatgatactg tatagacaag | |
| 2461 | ctttgtagtg aagtatagta gcaataattt ctgtacctga tcaagtttat tgcagccttt | |
| 2521 | cttttcctat ttcttttttt taagggttag tattaacaaa tggcaatgag tagaaaagtt | |
| 2581 | aacatgaaga ttttagaagg agagaactta caggacacag atttgtgatt ctttgactgt | |
| 2641 | gacactattg gatgtgattc taaaagcttt tattgagcat tgtcaaattt gtaagcttca | |
| 2701 | tagggatgga catcatatct ataatgccct tctatatgtg ctaccataga tgtgacattt | |
| 2761 | ttgaccttaa tatcgtcttt gaaaatgtta aattgagaaa cctgttaact tacattttat | |
| 2821 | gaattggcac attgtattac ttactgcaag agatatttca ttttcagcac agtgcaaaag | |
| 2881 | ttctttaaaa tgcatatgtc tttttttcta attccgtttt gttttaaagc acattttaaa | |
| 2941 | tgtagttttc tcatttagta aaagttgtct aattgatatg aagcctgact gatttttttt | |
| 3001 | ttccttacag tgagacattt aagcacacat tttattcaca tagatactat gtccttgaca | |
| 3061 | tattgaaatg attcttttct gaaagtattc atgatctgca tatgatgtat taggttaggt | |
| 3121 | cacaaaggtt ttatctgagg tgatttaaat aacttcctga ttggagtgtg taagctgagc | |
| 3181 | gatttctaat aaaattttag ttgtacactt ttagtagtca tagtgaagca ggtctagaaa | |
| 3241 | ataagccttt ggcagggaaa aagggcaatg ttgattaatc tcagtattaa accacattaa | |
| 3301 | tctgtatccc attgtctggc ttttgtaaat tcatccaggt caagactaag tatgttggtt | |
| 3361 | aataggaatc cttttttttt tttaaagact aaatgtgaaa aaataatcac tacttaagct | |
| 3421 | aattaatatt ggtcattaaa tttaaaggat ggaaatttat catgtttaaa aattattcaa | |
| 3481 | gcactcttaa aaccacttaa acagcctcca gtcataaaaa tgtgttcttt acaaatattt | |
| 3541 | gcttggcaac acgacttgaa ataaataaaa ctttgtttct taggagaaaa | |
| 1 | madgelnvds litrllevrg crpgkivqmt eaevrglcik sreiflsqpi lleleaplki | (SEQ ID NO:123) |
| 61 | cgdihgqytd llrlfeyggf ppeanylflg dyvdrgkqsl eticlllayk ikypenffll | |
| 121 | rgnhecasin riygfydeck rrfniklwkt ftdcfnclpi aaivdekifc chgglspdlq | |
| 181 | smeqirrimr ptdvpdtgll cdllwsdpdk dvqgwgendr gvsftfgadv vskflnrhdl | |
| 241 | dlicrahqvv edgyeffakr qlvtlfsapn ycgefdnagg mmsvdetlmc sfqilkpsek | |
| 301 | kakyqyggln sgrpvtpprt anppkkr | |

[0467] Putative function
[0468] Protein phosphatase

### Example 5

### Category 2

[0469] Line ID—231

[0470] Phenotype—Semi-lethal male and female, cytokinesis defect. In some cysts, variable sized Nebenkerns

[0471] Annotated Drosophila genome genomic segment containing P element insertion site (and map position)—AE003429 (3F)

[0472] P element insertion site—153,730

[0473] Annotated Drosophila genome Complete Genome candidate

[0474] CG5014—vap-33-1 vesicle associated membrane protein

(SEQ ID NO:124)

CACATCACTAGCTGACAGAATATATGGCTTTTTTACATTTTGCGTTTTCA
ACTGAAGTTTGCGAAGAAACCGAAGCGTGGTAAACCACTGAAATCGAAAA
TATCGACAGAAAAGCGACCTAAAGTCGGTGAAGAAGTCGCACGTTGATCG
TTGTGTTTTTTTCCCGAAATTTTCTGCAAAAAGCCCGTGCGTGCGTGAGT
TTCTCTGGCTCTTGCTTTTTTTTTGTCCATGCGTGTGTGTGTGGTCGCAT
AAATTTACCGATATTTCGCCTGTGAGAGCGAAACGAACGAAAAACGAAAG
AAAAAAAGAGAGACGAGTAAAGTAAAACGAAACAGGCATAAAAACAGCAG
CAGTTTTCTTGATATATTTGGCTAAAAAACGCAAACCAAACAGCCAGCAA
GAACAACAAATAGCTGGGCAAAAACAGGACGCACAAAAAATAAAATTAAA
ACGATAAGAGGCGAAAAGCGGAGAGAGTGAAATTCTCGGCAGCAACAACG
ACAAGAACAACACCAGGAGCAGCAGCAACAACAACAACAAAAGCCAGCCG
CCACAATGAGCAAATCACTCTTTGATCTTCCGTTGACCATTGAACCAGAA
CATGAGTTGCGTTTTGTGGGTCCCTTCACCCGACCCGTTGTCACAATCAT
GACTCTGCGCAACAACTCGGCTCTGCCTCTGGTCTTCAAGATCAAGACAA
CCGCCCCGAAACGCTACTGCGTACGTCCAAACATCGGCAAGATAATTCCC
TTTCGATCAACCCAGGTGGAGATCTGCCTTCAGCCATTCGTCTACGATCA
GCAGGAGAAGAACAAGCACAAGTTCATGGTGCAGAGCGTCCTGGCACCCA
TGGATGCTGATCTAAGCGATTTAAATAAATTGTGGAAGGATCTGGAGCCC
GAGCAGCTGATGGACGCCAAACTGAAGTGCGTTTTCGAGATGCCCACCGC
TGAGGCAAATGCTGAGAACACCAGCGGTGGTGGTGCCGTTGGCGGCGGAA
CCGGAGCTGCCGGAGGCGGAAGCGCGGGTGCCAATACTAGCTCAGCCAGC
GCTGAGGCGCTCGAGAGCAAGCCGAAGCTCTCCAGCGAGGATAAGTTTAA
GCCATCCAATTTGCTCGAAACGTCTGAGAGTCTGGACTTGCTGTCCGGAG
AGATCAAAGCGCTGCGTGAATGCAACATTGAATTGCGAAGAGAGAATCTT
CACTTGAAGGATCAAATCACACGTTTCCGGAGCTCGCCGGCCGTCAAACA
GGTGAATGAGCCCTATGCCCCAGTCCTGGCTGAGAAGCAGATTCCGGTCT
TTTACATTGCAGTTGCCATTGCTGCGGCCATCGTTAGCCTCCTGCTGGGC
AAATTCTTTCTCTGA

(SEQ ID NO:125)

MSKSLFDLPLTIEPEHELRFVGPFTRPVVTIMTLRNNSALPLVFKIKTTA
PKRYCVRPNIGKIIPFRSTQVEICLQPFVYDQQEKNKHKFMVQSVLAPMD
ADLSDLNKLWKDLEPEQLMDAKLKCVFEMPTAEANAENTSGGGAVGGGTG
AAGGGSAGANTSSASAEALESKPKLSSEDKFKPSNLLETSESLDLLSGEI
KALRECNIELRRENLHLKDQITRFRSSPAVKQVNEPYAPVLAEKQIPVFY
IAVAIAAAIVSLLLGKFFL

[0475] Human homologue of Complete Genome candidate

[0476] AAD13577 VAMP-associated protein B

| | | |
|---|---|---|
| 1 | gcgcgcccac ccggtagagg acccccgccc gtgccccgac cggtccccgc ctttttgtaa | (SEQ ID NO:126) |
| 61 | aacttaaagc gggcgcagca ttaacgcttc ccgccccggt gacctctcag gggtctcccc | |
| 121 | gccaaaggtg ctccgccgct aaggaacatg gcgaaggtgg agcaggtcct gagcctcgag | |
| 181 | ccgcagcacg agctcaaatt ccgaggtccc ttcaccgatg ttgtcaccac caacctaaag | |
| 241 | cttggcaacc cgacagaccg aaatgtgtgt tttaaggtga agactacagc accacgtagg | |
| 301 | tactgtgtga ggcccaacag cggaatcatc gatgcagggg cctcaattaa tgtatctgtg | |
| 361 | atgttacagc ctttcgatta tgatcccaat gagaaaagta aacacaagtt tatggttcag | |
| 421 | tctatgtttg ctccaactga cacttcagat atggaagcag tatggaagga ggcaaaaccg | |
| 481 | gaagacctta tggattcaaa acttagatgt gtgtttgaat tgccagcaga gaatgataaa | |
| 541 | ccacatgatg tagaaataaa taaaattata tccacaactg catcaaagac agaaacacca | |
| 601 | atagtgtcta agtctctgag ttcttctttg gatgacaccg aagttaagaa ggttatggaa | |
| 661 | gaatgtaaga ggctgcaagg tgaagttcag aggctacggg aggagaacaa gcagttcaag | |
| 721 | gaagaagatg gactgcggat gaggaagaca gtgcagagca acagccccat ttcagcatta | |
| 781 | gccccaactg ggaaggaaga aggccttagc acccggctct tggctctggt ggttttgttc | |
| 841 | tttatcgttg gtgtaattat tgggaagatt gccttgtaga ggtagcatgc acaggatggt | |
| 901 | aaattggatt ggtggatcca ccatatcatg ggatttaaat ttatcataac catgtgtaaa | |
| 961 | aagaaattaa tgtatgatga catctcacag gtcttgcctt taaattaccc ctccctgcac | |
| 1021 | acacatacac agatacacac acacaaatat aatgtaacga tcttttagaa agttaaaaat | |
| 1081 | gtatagtaac tgattgaggg ggaaaagaat gatctttatt aatgacaagg gaaaccatga | |
| 1141 | gtaatgccac aatggcatat tgtaaatgtc attttaaaca ttggtaggcc ttggtacatg | |
| 1201 | atgctggatt acctctctta aaatgacacc cttcctcgcc tgttggtgct ggcccttggg | |
| 1261 | gagctggagc ccagcatgct ggggagtgcg gtcagctcca cacagtagtc cccacgtggc | |
| 1321 | ccactcccgg cccaggctgc tttccgtgtc ttcagttctg tccaagccat cagctccttg | |
| 1381 | ggactgatga acagagtcag aagcccaaag gaattgcact gtggcagcat cagacgtact | |
| 1441 | cgtcataagt gagaggcgtg tgttgactga ttgacccagc gctttggaaa taaatggcag | |
| 1501 | tgctttgttc acttaaaggg accaagctaa atttgtattg gttcatgtag tgaagtcaaa | |
| 1561 | ctgttattca gagatgttta atgcatattt aacttattta atgtatttca tctcatgttt | |
| 1621 | tcttattgtc acaagagtac agttaatgct gcgtgctgct gaactctgtt gggtgaactg | |
| 1681 | gtattgctgc tggagggctg tgggctcctc tgtctctgga gagtctggtc atgtggaggt | |
| 1741 | ggggtttatt gggatgctgg agaagagctg ccaggaagtg ttttttctgg gtcagtaaat | |
| 1801 | aacaactgtc ataggcaggg aaattctcag tagtgacagt caactctagg ttaccttttt | |
| 1861 | taatgaagag tagtcagtct tctagattgt tcttatacca cctctcaacc attactcaca | |
| 1921 | cttccagcgc ccaggtccaa gtttgagcct gacctcccct tggggaccta gcctggagtc | |
| 1981 | aggacaaatg gatcgggctg caaagggtta gaagcgaggg caccagcagt tgtgggtggg | |
| 2041 | gagcaaggga agagagaaac tcttcagcga atccttctag tactagttga gagtttgact | |
| 2101 | gtgaattaat tttatgccat aaaagaccaa cccagttctg tttgactatg tagcatcttg | |
| 2161 | aaaagaaaaa ttataataaa gccccaaaat taaga | |
| 1 | makveqvlsl epqhelkfrg pftdvvttnl klgnptdrnv cfkvkttapr rycvrpnsgi | (SEQ ID NO:127) |
| 61 | idagasinvs vmlqpfdydp nekskhkfmv qsmfaptdts dmeavwkeak pedlmdsklr | |
| 121 | cvfelpaend kphdveinki isttasktet pivskslsss lddtevkkvm eeckrlqgev | |
| 181 | qrlreenkqf keedglrmrk tvqsnspisa laptgkeegl strllalvvl ffivgviigk | |
| 241 | ial | |

[0477] Putative function
[0478] Membrane associated protein which may be involved in priming synaptic vesicles

### Example 6

### Category 2

[0479] Line ID—248

[0480] Phenotype—Male sterile, cytokinesis defect. Cytokinesis defect, different meiotic stages within one cyst, variable sized nuclei, 2-4 nuclei. Also has a mitotic phenotype: semi-lethal, rod-like overcondensed chromosomes, high mitotic index, lagging chromosomes and bridges.

[0481] Annotated Drosophila genome genomic segment containing P element insertion site (and map position)—AE003431 (4D 1)

[0482] P element insertion site—299,078

[0483] Annotated Drosophila genome Complete Genome candidate

[0484] CG6998—cutup (dynein light chain)

(SEQ ID NO:128)

CAAAACGTTCAGTTGTGTTTCAGTTGTCGAGAAGTCAGGGTGTTTCTACC
TTCCATTTACCGTTCCAGTGTAAAATTCAGGCGACACGCTTAGCGTTACC
AAGGAGAACCGCTAAAAAGGGCCACTTTTCAAACGGTTAGATTCCAGTGA
AGTTGTAAGCACACAGGGAACCTAAAAAAAAAAAAAACAGCCAAAATGTC
TGATCGCAAGGCCGTGATTAAAAATGCCGACATGAGCGAGGAGATGCAGC
AGGATGCCGTCGATTGTGCGACACAGGCCCTCGAGAAGTACAACATTGAA
AAGGACATTGCGGCCTACATCAAGAAGGAGTTCGACAAAAAATACAATCC
CACATGGCATTGCATTGTCGGTCGCAACTTTGGATCGTATGTCACACACG
AGACGCGCCACTTTATTTACTTCTATTTGGGCCAGGTGGCTATTTTACTG
TTTAAGAGCGGTTAAAGTATTGTCGAGTCGGATGAAGTGGTGGTGAGGAG
GCTGATGGAGATGCAGCAGCTGCCCCGCCAGCAGCAACAACAGCAGGGGC
AGCAGTCGCATTTCGGAGCATCAGAGGATGAGGATCTAGAGCAGAAACAG
CAACAACCA

(SEQ ID NO:129)

MSDRKAVIKNADMSEEMQQDAVDCATQALEKYNIEKDIAAYIKKEFDKKY
NPTWHCIVGRNFGSYVTHETRHFIYFYLGQVAILLFKSG

[0485] Human homologue of Complete Genome candidate

[0486] AAH10744 Similar to RIKE cDNA 6720463E02 gene

| | | |
|---|---|---|
| 1 | gctgtgaggc gccagtgcgg agcgggcggg cgggcgggcg ggcgggcggc gcgaggcgga | (SEQ ID NO:130) |
| 61 | gcgcgggcgg ccggcgaaac tccaagggcg gaccgcggca gggagcgatc ggcctcgggc | |
| 121 | tgcgggagcc ggagaccgcg gcggcggcgg ctgctgcagc tgcaggagga gcccagggaa | |
| 181 | caccgcccct gcctgtgctc tgcctcgggc catcgctcct ccccagggcc cagtgcggac | |
| 241 | tcgcctccgt gaagtgtcac accatgtctg accggaaggc agtgatcaag aacgcagaca | |
| 301 | tgtctgagga catgcaacag gatgccgttg actgcgccac gcaggccatg gagaagtaca | |
| 361 | atatagagaa ggacattgct gcctatatca agaaggaatt tgacaagaaa tataacccta | |
| 421 | cctggcattg tatcgtgggc cgaaattttg gcagctacgt cacacacgag acaaagcact | |
| 481 | tcatctattt ttacttgggt caagttgcaa tcctcctctt caagtcaggc taggtggcca | |
| 541 | tggtgaaggt gtcagtggcg gcggcagcga tggcaagcag gcggcgttgc tgggactgtt | |
| 601 | ttgcactgga gccagcatca ggatgtcctc tccaatggct gtgctactgc atggactgta | |
| 661 | tactcgattt catgtgtatg tcgcagtaaa caaaaccaaa cctcaaaaaa aaaaaaaaaa | |
| 721 | aaaaaaaaaa aaaaa | |
| 1 | msdrkavikn admsedmqqd avdcatqame kyniekdiaa yikkefdkky nptwhcivgr | (SEQ ID NO:131) |
| 61 | nfgsyvthet khfiyfylgq vaillfksg | |

[0487] Putative function
[0488] Dynein light chain, a microtubule motor protein

### Example 7

### Category 2

[0489] Line ID—bb1-E1

[0490] Phenotype—Male sterile. Asynchronous meiotic divisions, cysts with large Nebenkern and 1-2 larger nuclei, testis from 2-3 old males become smaller. High mitotic index, colchicine type overcondensaton, many anaphases and telophases, no decondensation in telophase. Also has a mitotic phenotype: High mitotic index, coichicines-type overcondensed chromosomes, many ana- and relophases, no decondensation in telophase

[0491] Annotated Drosophila genome genomic segment containing P element insertion site (and map position)—AE003431 (4E)

[0492] P element insertion site—not determined

[0493] Annotated Drosophila genome Complete Genome candidate

[0494] CG2984—Pp2C 1 protein phosphatase

(SEQ ID NO:132)

TGTTCGCAAGTCGAGAGCAGAATCGAACGGCAAAAAATGCTGGCGAACAA
CAAATCATCAAGGTAAAACTGCGCGCCTTGGTCATTAAGTCTTTCATCGA
GGATAAAAGACCGATGTCTTTTAACGTTATTGCTGTAAGCAAAAGCAGAA
ATCACAATCTACTCATAAATCCTCGATTTGGTGCAAATTAAAGGAAATTC
ATCGGTTTTTGGCGGCCAGTTGCAAACACAAAATACTAAATACGCTAGAT
GGAGCACGCATACACGCAAGCTCGTTGGCGAACGTAAATTACATACATCA
TATAGATAGTCGTCCCGCTTGCACTGCCCGTCACAGCGAGGGCTGCGAGA
GCGAGAGCGGGAGAGAGAAAGGCCTGAGTCGCTTTTTCTTCTTGTACTTT
ATATATTTTTTATTGTTTTTTTGTGTTGTGTTGCGTTGTACGTGTGTGTG
AGAGTGCCAAATGTCAACGGAAATTACAACACTGCGAGACGGAGAAGTCT
AAAAGGCAGAAGAAGAAGAAGCAGCAGCAGGCAGCATAAACAAAACTCGG
GGGAAAAATGTTGCCCGCCAATAACAGGAGTAGCACCAGCACCCATACCA
ACACAAATGCCAACACAATCAACGCCACTACCAATACCACCAACAGATGC
CTCATCAATACGGCCATCGAAAAAACGGTAGTCCGTTTGCGAGAGACGGC
AGCGAATAGCGCACCAGCTCCAGCCACAGCCTCCGTTACTCGCCACGGCG
GCAGCAGCAGCGGCAATAACAACAATAACAGTGCATGCCATCCAGCACTG
GATGCCAGCAGTGATGTTGTTGTTGTTGAACCGGCAGCGGTAGGAGTCGC
ACAGGAGGAAGAGGAAGAGCCGGAGCAAAGGCCAGAGAGGATCAGCATAC
CCATTCCCGACCTGGCGTTCACCGAGATGGAAGCATATGCCGAGGATATA
GTCGTCGATATGGAGGGGGGATCACCAGCCAAGCCTTTAAATCCAAAGAA
ACAACGTTTAAACTCAGCAACAACCACAACAATAAATCGCTCGAGGGGCG
GCGGAGCGGCACAGAGTCGATTACGCCGGTCGGCGGCCATCGTTCCACCG
CGATCGATTCCAGAGAGCTGTGCCAGCAGCAGCAATTCCAATTCGAGCAG
CAGTTCCAACAGTAATTCCAGTTCCAGCTCCGCTACAGGAAGTAGCGCAT
CCACCGGCAATCCGTCGCCGTGCTCCTCCCTGGGCGTCAATATGCGCGTA
ACTGGACAATGCTGCCAGGGAGGCCGGAAATACATGGAGGATCAGTTCTC
GGTGGCCTACCAGGAATCACCGATCACCCACGAACTGGAATACGCATTTT
TTGGCATCTACGACGGACACGGCGGTCCCGAGGCCGCGCTCTTCGCCAAG
GAGCACCTTATGCTCGAGATCGTCAAGCAGAAGCAGTTCTGGTCTGATCA
GGATGAGGATGTCCTGCGGGCAATACGCGAGGGATACATCGCCACACATT
TCGCCATGTGGCGGGAACAAGAGAAATGGCCACGCACTGCCAATGGGCAT
CTGAGCACCGCCGGCACCACCGCCACAGTGGCCTTTATGCGTCGCGAGAA
GATCTACATTGGTCATGTGGGTGATTCTGGGATCGTTTTGGGTTACCAGA
ACAAGGGCGAACGCAACTGGCGTGCTCGTCCACTGACCACGGACCACAAG
CCGGAGTCACTGGCAGAGAAGACGAGAATCCAGCGTTCCGGCGGCAATGT
TGCCATCAAATCGGGAGTTCCGCGAGTGGTATGGAACCGACCCAGGGACC
CAATGCATCGCGGTCCCATTCGCCGCAGAACTCTGGTAGATGAAATACCC
TTTTTGGCGGTGGCTCGTTCCCTGGGCGATCTCTGGAGCTACAATTCCCG
CTTCAAGGAATTCGTTGTGAGTCCCGATCCGGATGTCAAAGTGGTTAAAA
TAAATCCCAGTACCTTTAGATGCTTAATTTTCGGCACCGATGGCCTGTGG
AATGTGGTGACCGCCCAGGAGGCGGTGGACAGTGTGCGCAAGGAGCATCT
AATCGGCGAGATACTCAACGAGCAGGACGTTATGAATCCCAGCAAGGCGC
TGGTGGATCAGGCCCTCAAAACCTGGGCCGCCAAGAAGATGCGTGCGGAC
AACACGTCCGTTGTGACTGTGATACTAACACCAGCGGCCCGCAATAATTC
GCCCACAACGCCAACACGTTCCCCATCCGCGATGGCACGCGACAATGATC
TGGAGGTGGAGCTACTGCTGGAGGAGGACGACGAGGAGCTGCCGACACTG
GATGTGGAGAACAACTACCCTGACTTTCTCATCGAGGAGCATGAGTATGT
GCTGGACCAGCCGTACAGTGCATTGGCCAAGCGACATTCGCCTCCGGAAG
CCTTCCGCAACTTCGACTACTTCGATGTGGACGAGGACGAGTTGGATGAA
GATGAGGAAACAGTGGAAGAAGACGAGGAGGAGGAGGAGGAAGAGGAGGA
AACCAAATCGGTGGGAATTCTACAGCAAAGTTTGTTCAACCCCAGAAAAA
CGTGGCGCAAGTCAACCATCAACAATTCCTGGAGTGGCGTCACCGAACCG
GAACCGGAACCCGATCCCGAACCAGATCGAATAGATGTCTTAACACTGGA
CATGTACTCCCACACCAGCATTGACAAGGGCACCAATTATGGCGGCAGCA
TAGCCCAGTCCTCAATAGATCCTGCGGAGACGGCTGAAAATCGTGAGCTG
AGTGAGTTGGAGCAGCATCTGGAGAGTAGCTACAGTTTCGCCGAGTCGTA
CAACTCCCTGTTAAACGAGCAGGAGGAGCAGGAGGCACGCTCACGTTCAG
CAGCAGCAGCAGCCGCCGCCGCAGAAGCAGCAGCAGTAGAAGCACAACAA
ACCACTGCCCATTCCGCATCCGTTGTGCTGGACCGCAGCATGTTGGAGAT
CATCCAGGAGCAGCAGCACTATCAGCAGCAAGAGGGCTATTCGCTAACGC
AACTAGAGACCAGACGTGAAAGGGAGCGGCTGACCGAATCGTGGCCACAG
CAGCCGGCTGAGCTGCTCGAGCTGGATGCTCTACTGCAGCAGGAGCGTGC
CGAGGAGGAGCAGGTAGCCCTGGAGCAGCAGCAGCAGCGCGAACAGCAAA
TGGAGCAAATGGAGGTGGAGGCCATTAGTAGTTCGGGACAGCACGAATTT
GCTTACCCAGTGACCACCGCCACAGCCAGCGAGTGGTGTGCTACATTACA
AGAAGACGAGGAGGAGTTGGACTCCACAGTAATAGACATAGTAATTCAAC
CCGAACAAGAGTTGCAGGACAATGAAGTGAGCTCCACGTTGCCCGCCACA
CCCACTCATGTGGAGCCTGAGCAGATTGTGGACAAGATGGAGCCCCTGAA
GGTTCAGGAGATGCTAACCGCGGTCGAAAAACCTCCATCCAAGCAGGAAA
AGAAGCTGCCGAAGAAGCAAGAGACCAAACAGGTTGCTGTGCTAGATACA
GTGGCCGAGATGCCCAAAGAGGATGCCCATGCCGTGCACTATATATTCCA
GCGCATTCAAAAGGTTCAGGACTCTGAGGCAACACCAGTGGCCGTGACGA
ATTCCACAATGGCTGACGCCCTGCCCACCGAATCTAGTGGACTGGGAGGA
TCTATGACCGCGCCCCGAATCCGACGCTATCGCAACGTGCCCAACGAGAA
CCATCAGCACATGCAGACGCGTCGTCGTCAGATCTTCAAGCATGTCAAGC
CAAAGTCCTTCATACAGTCCAGTGCTGCGGCGATTGTGGCCTATGGAGAC
AGCACCGAAACGGTCGGAGGAACAGCCGGAGCATCTGGCACACCTGCAGC
TGGGCGTGTAGGCGGGGGCGGTGGCGGCGGCGGCGGCAGAGGATCGGCCA
GTGGTGGGAGCAGTCCAGCGGTGGCAGCCAATAGTCGGCGGAGCGTCAAT
GTGGTGGCCAATGCGAGTGGAAACAGCGCTAGCAAAGTTGTGCCCAGCAG
CAGTTCCATGATGATGACCCGCCGCAGTCACACCTTGACGGCCAGCGGTG
GTGTGAACAAAAGGCAGCTGCGCAGCAGTCTCTGCACCTTGGGCCTGGGT
GTGGGTGTCGGTGTCGGTCTGGGCATGGACCTGGACATGACCAAGCGCAC
GCTAAGGACAAGGAATGTACCCGCTTTGTCGGGCGGTTCAGCCACGCCAT
CTAGCAATTCGTCGCCAGCCAGCGGAGGCAGCAGTCCAGCCGGTTTCACA
AGCCCAGCCAGTCCGGTCATCACGTCCAGGGGAAGCGGATCGCGTACTAC
CGCCTCGCCAGCCAGGCGCCTAAAACGCAGTCATGAGGATCGGGAGCAAA
GAATGAGCTTGCGACGGAGCACTCTGAGTGGCAGTGCCAGCGGCAGTGGG
CTGGTGGGCACTGGTGGGTCGCCCTCGAATGTGAAATCAAATCGCCTGCA
GGCCTGCAATGGAGCCATCTCTGCGCGTCCGCCGCCCTCGCCGAAGAAAC
TGAATGCAGCCGTGCCCACATTGGCAATTGGAACGCGTGCATATACGGCG
GCGTTGGCGGCGGCGGCGGATCACCTGAACAAGCGGTGGTCGTTGCGCAG
CAGCAGTGGCAACTCTGGCAATCTGATAACCGCCATCAGTTGCTACAGTG
ACAGGAGCAGGGCGGCGACTGCGGCGGGATCACCGGGATCTGGAGGCGGG
GCAGCGGGACCACCAGGAGCATCTTTGGCCGCATCCACAGTCGGCACGCG
AAGGCGCTAGGCTAGATTGTAACGAAACATGCGAGCAACTTGCAAGTACA
AATCCTAAGCAACGGAAAATTTTAGATCCTAGTATACTACTTTACTGAAA
ACGCAAAATTGCATAATTTAACCAATTTTTTTATGTGCACAACACACACA
C

(SEQ ID NO:133)

MLPANNRSSTSTHTNTNANTINATTNTTNRCLINTAIEKTVVRLRETAAN
SAPAPATASVTRHGGSSSGNNNNNSACHPALDASSDVVVVEPAAVGVAQE
EEEEPEQRPERISIPIPDLAFTEMEAYAEDIVVDMEGGSPAKPLNPKKQR
LNSATTTTINRSRGGGAAQSRLRRSAAIVPPRSIPESCASSSNSNSSSSS
NSNSSSSSATGSSASTGNPSPCSSLGVNMRVTGQCCQGGRKYMEDQFSVA
YQESPITHELEYAFFGIYDGHGGPEAALFAKEHLMLEIVKQKQFWSDQDE
DVLRAIREGYIATHFAMWREQEKWPRTANGHLSTAGTTATVAFMRREKIY
IGHVGDSGIVLGYQNKGERNWRARPLTTDHKPESLAEKTRIQRSGGNVAI
KSGVPRVVWNRPRDPMHRGPIRRRTLVDEIPFLAVARSLGDLWSYNSRFK
EFVVSPDPDVKVVKINPSTFRCLIFGTDGLWNVVTAQEAVDSVRKEHLIG
EILNEQDVMNPSKALVDQALKTWAAKKMRADNTSVVTVILTPAARNNSPT
TPTRSPSAMARDNDLEVELLLEEDDEELPTLDVENNYPDFLIEEHEYVLD
QPYSALAKRHSPPEAFRNFDYFDVDEDELDEDEETVEEDEEEEEEEEETK
SVGILQQSLFNPRKTWRKSTINNSWSGVTEPEPEPDPEPDRIDVLTLDMY
SHTSIDKGTNYGGSIAQSSIDPAETAENRELSELEQHLESSYSFAESYNS
LLNEQEEQEARSRSAAAAAAAAEAAAVEAQQTTAHSASVVLDRSMLEIIQ
EQQHYQQQEGYSLTQLETRRERERLTESWPQQPAELLELDALLQQERAEE
EQVALEQQQQREQQMEQMEVEAISSSGQHEFAYPVTTATASEWCATLQED
EEELDSTVDIVIQPEQELQDNEVSSTLPATPTHVEPEQIVDKMEPLKVQ
EMLTAVEKPPSKQEKKLPKKQETKQVAVLDTVAEMPKEDAHAVHYIFQRI
QKVQDSEATPVAVTNSTMADALPTESSGLGGSMTAPRIRRYRNVPNENHQ
HMQTRRRQIFKHVKPKSFIQSSAAAIVAYGDSTETVGGTAGASGTPAAGR
VGGGGGGGGGRGSASGGSSPAVAANSRRSVNVVANASGNSASKVVPSSSS
MMMTRRSHTLTASGGVNKRQLRSSLCTLGLGVGVGVGLGMDLDMTKRTLR
TRNVPALSGGSATPSSNSSPASGGSSPAGFTSPASPVITSRGSGSRTTAS
PARRLKRSHEDREQRMSLRRSTLSGSASGSGLVGTGGSPSNVKSNRLQAC
NGAISARPPPSPKKLNAAVPTLAIGTRAYTAALAAAADHLNKRWSLRSSS
GNSGNLITAISCYSDRSRAATAAGSPGSGGGAAGPPGASLAASTVGTRRR

[0495] Human homologue of Complete Genome candidate

[0496] AAB61637 Wip1

| | | |
|---|---|---|
| 1 | ctggctctgc tcgctccggc gctccggccc agctctcgcg gacaagtcca gacatcgcgc | (SEQ ID NO:134) |
| 61 | gccccccctt ctccgggtcc gccccctccc ccttctcggc gtcgtcgaag ataaacaata | |
| 121 | gttggccggc gagcgcctag tgtgtctccc gccgccggat tcggcgggct gcgtgggacc | |
| 181 | ggcgggatcc cggccagccg gccatggcgg ggctgtactc gctgggagtg agcgtcttct | |
| 241 | ccgaccaggg cgggaggaag tacatggagg acgttactca aatcgttgtg gagcccgaac | |
| 301 | cgacggctga agaaaagccc tcgccgcggc ggtcgctgtc tcagccgttg cctccgcggc | |
| 361 | cgtcgccggc cgcccttccc ggcggcgaag tctcggggaa aggcccagcg gtggcagccc | |
| 421 | gagaggctcg cgaccctctc ccggacgccg gggcctcgcc ggcacctagc cgctgctgcc | |
| 481 | gccgccgttc ctccgtggcc tttttcgccg tgtgcgacgg gcacggcggg cgggaggcgg | |
| 541 | cacagtttgc ccgggagcac ttgtggggtt tcatcaagaa gcagaagggt ttcacctcgt | |
| 601 | ccgagccggc taaggtttgc gctgccatcc gcaaaggctt tctcgcttgt caccttgcca | |
| 661 | tgtggaagaa actggcggaa tggccaaaga ctatgacggg tcttcctagc acatcaggga | |
| 721 | caactgccag tgtggtcatc attcggggca tgaagatgta tgtagctcac gtaggtgact | |
| 781 | caggggtggt tcttggaatt caggatgacc cgaaggatga ctttgtcaga gctgtggagg | |
| 841 | tgacacagga ccataagcca gaacttccca aggaaagaga acgaatcgaa ggacttggtg | |
| 901 | ggagtgtaat gaacaagtct ggggtgaatc gtgtagtttg gaaacgacct cgactcactc | |
| 961 | acaatggacc tgttagaagg agcacagtta ttgaccagat tccttttctg gcagtagcaa | |
| 1021 | gagcacttgg tgatttgtgg agctatgatt tcttcagtgg tgaatttgtg gtgtcacctg | |
| 1081 | aaccagacac aagtgtccac actcttgacc ctcagaagca caagtatatt atattgggga | |
| 1141 | gtgatggact ttggaatatg attccaccac aagatgccat ctcaatgtgc caggaccaag | |
| 1201 | aggagaaaaa atacctgatg ggtgagcatg gacaatcttg tgccaaaatg cttgtgaatc | |
| 1261 | gagcattggg ccgctggagg cagcgtatgc tccgagcaga taacactagt gccatagtaa | |
| 1321 | tctgcatctc tccagaagtg gacaatcagg gaaactttac caatgaagat gagttatacc | |
| 1381 | tgaacctgac tgacagccct tcctataata gtcaagaaac ctgtgtgatg actccttccc | |
| 1441 | catgttctac accaccagtc aagtcactgg aggaggatcc atggccaagg gtgaattcta | |
| 1501 | aggaccatat acctgccctg gttcgtagca atgccttctc agagaatttt ttagaggttt | |
| 1561 | cagctgagat agctcgagag aatgtccaag gtgtagtcat accctcaaaa gatccagaac | |
| 1621 | cacttgaaga aaattgcgct aaagccctga ctttaaggat acatgattct ttgaataata | |
| 1681 | gccttccaat tggccttgtg cctactaatt caacaaacac tgtcatggac caaaaaaatt | |
| 1741 | tgaagatgtc aactcctggc caaatgaaag cccaagaaat tgaaagaacc cctccaacaa | |
| 1801 | actttaaaag gacattagaa gagtccaatt ctggccccct gatgaagaag catagacgaa | |
| 1861 | atggcttaag tcgaagtagt ggtgctcagc ctgcaagtct ccccacaacc tcacagcgaa | |
| 1921 | agaactctgt taaactcacc atgcgacgca gacttagggg ccagaagaaa attggaaatc | |
| 1981 | ctttacttca tcaacacagg aaaactgttt gtgtttgctg aaatgcatct gggaaatgag | |
| 2041 | gtttttccaa acttaggata taagagggct ttttaaattt ggtgccgatg ttgaactttt | |
| 2101 | tttaagggga gaaaattaaa agaaatatac agtttgactt tttggaattc agcagtttta | |
| 2161 | tcctggcctt gtacttgctt gtattgtaaa tgtggatttt gtagatgtta gggtataagt | |
| 2221 | tgctgtaaaa tttgtgtaaa tttgtatcca cacaaattca gtctctgaat acacagtatt | |
| 2281 | cagagtctct gatacacagt aattgtgaca atagggctaa atgtttaaag aaatcaaaag | |
| 2341 | aatctattag attttagaaa aacatttaaa ctttttaaaa tacttattaa aaaatttgta | |
| 2401 | taagccactt gtcttgaaaa ctgtgcaact ttttaaagta aattattaag cagactggaa | |
| 2461 | aagtgatgta ttttcatagt gacctgtgtt tcacttaatg tttcttagag ccaagtgtct | |
| 2521 | tttaaacatt attttttatt tctgatttca taattcagaa ctaaattttt catagaagtg | |
| 2581 | ttgagccatg ctacagttag tcttgtccca attaaaatac tatgcagtat ctcttacatc | |
| 2641 | agtagcattt ttctaaaacc ttagtcatca gatatgctta ctaaatcttc agcatagaag | |
| 2701 | gaagtgtgtt tgcctaaaac aatctaaaac aattcccttc tttttcatcc cagaccaatg | |
| 2761 | gcattattag gtcttaaagt agttactccc ttctcgtgtt tgcttaaaat atgtgaagtt | |
| 2821 | ttccttgcta tttcaataac agatggtgct gctaattccc aacatttctt aaattatttt | |
| 2881 | atatcataca gttttcattg attatatggg tatatattca tctaataaat cagtgaactg | |
| 2941 | ttcctcatgt tgctgaaaaa aaaaaaaaaa aaa | |
| 1 | maglyslgvs vfsdqggrky medvtqivve peptaeekps prrslsqplp prpspaalpg | (SEQ ID NO:135) |
| 61 | gevsgkgpav aareardplp dagaspapsr ccrrrssvaf favcdghggr eaaqfarehl | |
| 121 | wgfikkqkgf tssepakvca airkgflach lamwkklaew pktmtglpst sgttasvvii | |
| 181 | rgmkmyvahv gdsgvvlgiq ddpkddfvra vevtqdhkpe lpkererieg lggsvmnksg | |
| 241 | vnrvvwkrpr lthngpvrrs tvidqipfla varalgdlws ydffsgefvv spepdtsvht | |
| 301 | ldpqkhkyii lgsdglwnmi ppqdaismcq dqeekkylmg ehgqscakml vnralgrwrq | |
| 361 | rmlradntsa ivicispevd nqgnftnede lylnltdsps ynsqetcvmt pspcstppvk | |
| 421 | sleedpwprv nskdhipalv rsnafsenfl evsaeiaren vqgvvipskd pepleencak | |
| 481 | altlrihdsl nnslpiglvp tnstntvmdq knlkmstpgq mkaqeiertp ptntkrtlee | |
| 541 | snsgplmkkh rrnglsrssg aqpaslptts qrknsvkltm rrrlrgqkki gnpllhqhrk | |
| 601 | tvcvc | |

[0497] Putative function
[0498] Protein phosphatase, with p53 dependent expression, so may be inhibitory to division

### Example 8

### Category 2

[0499] Line ID—ms(1)04

[0500] Phenotype—Cytokinesis defect, small testis, no meiosis observed, variable sized Nebenkerns with 2-4N nuclei

[0501] Annotated Drosophila genome genomic segment containing P element insertion site (and map position)—AE003442 (7C-D)

[0502] P element insertion site—not determined

[0503] Annotated Drosophila genome Complete Genome candidate

[0504] CG1524—RpS14A ribosomal protein (2 splice variants)

(SEQ ID NO:136)

GATATCCGGTTAACGCAAGTGTTGCTGATCGACAAACAAACCCAGAATGG
CACCCAGGAAGGCTAAAGTTCAGAAGGAGGAGGTTCAGGTCCAGCTGGGA
CCCCAAGTTCGCGACGGCGAGATCGTGTTCGGAGTGGCTCACATCTACGC
CAGCTTCAACGACACCTTCGTCCATGTCACTGATCTGTCCGGCCGTGAGA
CCATCGCTCGTGTCACCGGAGGCATGAAGGTGAAGGCCGATCGTGATGAG
GCTTCGCCCTACGCCGCTATGTTGGCCGCTCAGGATGTGGCTGAGAAGTG
CAAGACACTGGGCATTACTGCCCTGCATATTAAGCTGCGTGCCACCGGCG
GCAACAAGACCAAGACCCCCGGACCCGGCGCCCAGTCCGCTCTGCGTGCT
TTGGCCCGTTCGTCCATGAAGATTGGCCGCATCGAGGATGTGACGCCCAT
CCCATCGGACTCCACCCGCAGGAAGGGCGGTCGCCGTGGTCGTCGTCTGT
AGATGGCAGTATCTGGAAAGCAGTAGTCTATGTTTGCGGTCGAAATACAA
TACTGC

(SEQ ID NO:137)

MAPRKAKVQKEEVQVQLGPQVRDGEIVFGVAHIYASFNDTFVHVTDLSGR
ETIARVTGGMKVKADRDEASPYAAMLAAQDVAEKCKTLGITALHIKLRAT
GGNKTKTPGPGAQSALRALARSSMKIGRIEDVTPIPSDSTRRKGGRRGRR
L

(SEQ ID NO:138)

CAAGTGGTTCGTCTTTAATTTTTCCCTCTTAATTTTTGCGAAAAAAAACC
CGACTTTGAGCCCCTAAACTTAAAAAATGTGCCTTCCTCCAGAGTGTTCA
GAGCGTCGACTGAAAATGACAAACAAGCTGCCCGGCAGCTAATTTTTTTT
TACATTTTTTGTTTTGTTTGTTCGCACGCATTTGTTTTTATTTGTGAAAC
ACGTGGTATAAATGTGGAAATTCCCTTGCTATTCCCGCAGTTGCTGATCG
ACAAACAAACCCAGAATGGCACCCAGGAAGGCTAAAGTTCAGAAGGAGGA
GGTTCAGGTCCAGCTGGGACCCCAAGTTCGCGACGGCGAGATCGTGTTCG
GAGTGGCTCACATCTACGCCAGCTTCAACGACACCTTCGTCCATGTCACT
GATCTGTCCGGCCGTGAGACCATCGCTCGTGTCACCGGAGGCATGAAGGT
GAAGGCCGATCGTGATGAGGCTTCGCCCTACGCCGCTATGTTGGCCGCTC
AGGATGTGGCTGAGAAGTGCAAGACACTGGGCATTACTGCCCTGCATATT
AAGCTGCGTGCCACCGGCGGCAACAAGACCAAGACCCCCGGACCCGGCGC
CCAGTCCGCTCTGCGTGCTTTGGCCCGTTCGTCCATGAAGATTGGCCGCA
TCGAGGATGTGACGCCCATCCCATCGGACTCCACCCGCAGGAAGGGCGGT
CGCCGTGGTCGTCGTCTGTAGATGGCAGTATCTGGAAAGCAGTAGTCTAT
GTTTGCGGTCGAAATACAATACTGC

(SEQ ID NO:139)

MAPRKAKVQKEEVQVQLGPQVRDGEIVFGVAHIYASFNDTFVHVTDLSGR
ETIARVTGGMKVKADRDEASPYAAMLAAQDVAEKCKTLGITALHIKLRAT
GGNKTKTPGPGAQSALRALARSSMKIGRIEDVTPIPSDSTRRKGGRRGRR
L

[0505] Human homologue of Complete Genome candidate

[0506] A25220 ribosomal protein S14, cytosolic

```
(SEQ ID NO:140)
    1 ctccgccctc tcccactctc tctttccggt gtggagtctg gagacgacgt gcagaaatgg
  61 cacctcgaaa ggggaaggaa aagaaggaag aacaggtcat cagcctcgga cctcaggtgg
121 ctgaaggaga gaatgtattt ggtgtctgcc atatctttgc atccttcaat gacacttttg
181 tccatgtcac tgatctttct ggcaaggaaa ccatctgccg tgtgactggt gggatgaagg
241 taaaggcaga ccgagatgaa tcctcaccat atgctgctat gttggctgcc caggatgtgg
301 cccagaggtg caaggagctg ggtatcaccg ecetacacat caaactccgg gccacaggag
361 gaaataggac caagacccct ggacctgggg cccagtcggc cctcagagcc cttgcccgct
421 cgggtatgaa gatcgggcgg attgaggatg tcacccccat cccctctgac agcactcgca
481 ggaagggggg tcgccgtggt cgccgtctgt gaacaagatt cctcaaaata ttttctgtta
541 ataaattgcc ttcatgtaaa aaaaaaaaaa aaaaaaaaaa aaaaaaaaa
(SEQ ID NO:141)
    1 maprkgkekk eeqvislgpq vaegenvfgv chifasfndt fvhvtdlsgk eticrvtggm
  61 kvkadrdess pyaamlaaqd vaqrckelgi taihikirat ggnrtktpgp gaqsalrala
121 rsgmkigrie dvtpipsdst rrkggrrgrr l
```

[0507] Putative function
[0508] Ribosomal protein

### Example 9

### Category 2

[0509] Line ID—thb-a

[0510] Phenotype—Male sterile. Cytokinesis defect, larger Nebenkerns with 2-4N nuclei

[0511] Annotated Drosophila genome genomic segment containing P element insertion site (and map position)—(10B1-2)

[0512] P element insertion site—not determined

[0513] Annotated Drosophila genome Complete Genome candidate
[0514] 2 candidates:

[0515] CG1453—kinesin-like protein KIF2 homolog

```
(SEQ ID NO:142)
AAACTAAAAAATTGTGTTGCTGACATCTGGTCGCTTGCAAAACTATTTCT
AGCAGATTTTGTGATATTTCGTTGTGATCGGTCGATAAATCCGCCAGTTT
TTTTTTTAATGGAAAGTGCTAACACATTGTAGCGGTTGGGAAGATAGCAG
GAAAGAGCCAGCGGGCTGCCGTTTTTCCTTTTTGTTATCCGTTGCCAGAC
GCAACGAAAACGACAGTTGGCATTTGAATTCAGCACAAACACACATACTA
ACGCCGACCCGCAAGCAGCACACACACACACACTGGGACACTCGAAAAAA
AAAAAACAGACGCTGTCGGCGACCTCGACAAGCAGTTGGGTTCGATTTAG
TTGTCAATGCCTTGAATTCGGTTCGGGGCTTAGTTTCCACAAGTTTATCG
CTCGTCAAGAAACAACGAAATAAAATTATTTTCGACCTAAAAAATCTGAC
TAAATTGTGTTTTTTGTTTATGTATTTATTTAGGCACATTTTGCACACCA
CAACGTAGTTACTACATCTACGACTAACGGAACTCCTCCTGCAAGCAGTG
GAAGTTGCTGTCCATCAAGCAGTACTCGGAGTTAACGCAGGATAAGCCGG
GAGAAAGAGAAAGAGATCGGTGGAGAATAGAGATATACAGGTGGAGTCAA
AGAGGAAGGATCATGGACATGATTACGGTGGGGCAGAGCGTCAAGATCAA
GCGGACGGATGGCCGCGTCCACATGGCCGTGGTGGCGGTGATCAACCAGT
CGGGCAAGTGCATCACAGTCGAATGGTACGAGCGCGGCGAAACGAAGGGC
AAGGAGGTAGAACTGGACGCCATACTCACGCTCAATCCGGAGCTAATGCA
AGATACTGTCGAACAGCACGCCGCCCCGGAGCCCAAGAAACAAGCCACCG
CGCCGATGAACCTCTCGCGTAATCCCACACAATCGGCTATCGGTGGCAAT
CTCACCAGCCGTATGACCATGGCCGGAAACATGCTGAACAAGATCCAGGA
AAGCCAGTCGATTCCCAATCCGATTGTCAGCAGCAATAGCGTGAATACAA
ACAGCAACTCCAACACTACGGCCGGCGGAGGTGGTGGCACCACAACGTCG
ACGACCACTGGATTACAGCGTCCACGGTACTCGCAAGCTGCTACCGGCCA
GCAGCAGACAAGGATCGCCTCGGCGGTGCCTAATAACACATTGCCCAATC
CCAGCGCGGCAGCCAGTGCTGGTCCGGCGGCACAAGGAGTCGCCACTGCG
GCCACAACCCAGGGAGCTGGCGGCGCTAGTACCCGGCGATCGCACGCATT
GAAAGAGGTGGAGCGACTGAAGGAGAATCGCGAGAAGCGACGCGCCCGAC
AGGCCGAGATGAAGGAGGAGAAGGTGGCGCTGATGAACCAGGATCCGGGC
AATCCAAACTGGGAGACGGCGCAAATGATACGCGAATATCAGAGCACGCT
GGAATTTGTGCCGCTGCTCGATGGCCAGGCCGTCGATGACCATCAGATCA
CAGTGTGCGTGCGCAAGCGTCCCATTAGCCGCAAGGAGGTCAATCGCAAG
GAGATCGATGTCATTTCGGTGCCGCGCAAGGACATGCTCATCGTGCACGA
GCCGCGCAGCAAGGTCGACCTCACCAAGTTCCTGGAGAACCACAAGTTTC
GCTTCGACTACGCCTTCAACGACACGTGCGACAATGCCATGGTATACAAA
TACACAGCCAAGCCGTTGGTGAAAACCATTTTCGAGGGCGGAATGGCGAC
GTGCTTCGCCTACGGCCAGACGGGATCGGGCAAAACGCACACCATGGGCG
GTGAGTTTAATGGAAAGGTGCAGGACTGCAAGAACGGCATCTACGCCATG
GCGGCCAAGGATGTCTTTGTGACCCTGAATATGCCGCGTTACCGCGCCAT
GAATCTAGTCGTCTCGGCCAGTTTCTTTGAGATTTACAGTGGCAAGGTCT
TCGATCTTCTGTCCGACAAGCAGAAACTGCGCGTCCTGGAGGATGGTAAA
CAGCAAGTGCAGGTGGTGGGACTCACCGAGAAGGTGGTCGATGGCGTCGA
GGAGGTACTGAAGCTCATCCAGCACGGCAATGCTGCCCGAACATCCGGCC
AGACGTCGGCCAACTCCAATTCGTCGCGTTCGCACGCCGTTTTCCAGATT
GTGCTGCGGCCGCAGGGCTCGACGAAGATCCATGGCAAGTTCTCGTTCAT
CGATCTGGCGGGCAATGAGCGGGGCGTGGACACTTCCTCGGCCGATCGGC
AGACGCGTATGGAGGGTGCCGAGATTAACAAATCGCTGCTGGCCCTCAAG
GAGTGCATTCGTGCGTTGGGCAAACAGTCGGCCCACTTGCCCTTCCGTGT
CTCCAAACTCACCCAGGTGCTGCGCGACTCGTTCATTGGCGAGAAGAGCA
AGACGTGCATGATAGCCATGATCTCGCCGGGACTTAGCTCCTGCGAGCAC
ACGCTCAACACGCTGCGCTATGCGGATCGTGTCAAGGAGCTGGTGGTCAA
GGATATCGTCGAAGTTTGCCCTGGCGGCGACACCGAGCCCATCGAGATCA
CGGACGACGAGGAGGAGGAGGAGCTCAACATGGTGCATCCGCACTCGCAT
CAGCTGCATCCCAATTCGCATGCACCGGCCAGCCAGTCGAATAATCAGCG
TGCTCCGGCCTCTCATCACTCGGGGGCGGTCATTCACAACAATAATAATA
ACAACAACAAGAACGGAAACGCCGGCAACATGGACCTGGCCATGCTGAGT
TCGCTGAGCGAACACGAGATGTCCGACGAGCTGATTGTGCAGCACCAGGC
CATCGACGACCTGCAGCAGACGGAGGAGATGGTGGTGGAGTATCATCGCA
CCGTTAATGCCACACTGGAGACCTTCCTCGCCGAGTCGAAGGCGCTGTAC
AATCTGACCAACTATGTGGACTACGACCAGGACTCGTACTGCAAACGGGG
CGAGTCGATGTTCTCGCAGCTGCTGGACATCGCCATCCAGTGCCGCGACA
TGATGGCCGAATATCGCGCCAAGTTGGCCAAGGAGGAGATGCTGTCGTGC
AGCTTCAATTCGCCGAATGGCAAGCGTTAGT
(SEQ ID NO:143)
    1 mitvgqsvki krtdgrvhma vvavinqsgk citvewyerg etkgkeveld ailtlnpelm
  61 qdtveqhaap epkkqatapm nlsrnptqsa iggnltsrmt magnmlnkiq esqsipnpiv
121 ssnsvntnsn snttaggggg tttstttglq rprysqaatg qqqtriasav pnntlpnpsa
181 aasagpaaqg vataattqga ggastrrsha lkeverlken rekrrarqae mkeekvalmn
241 qdpgnpnwet aqmireyqst lefvplldgq avddhqitvc vrkrpisrke vnrkeidvis
301 vprkdmlivh eprskvdltk flenhkfrfd yafndtcdna mvykytakpl vktifeggma
361 tcfaygqtgs gkthtmggef ngkvqdckng iyamaakdvf vtlnmpryra mnlvvsasff
421 eiysgkvfdl lsdkqklrvl edgkqqvqvv gltekvvdgv eevlkliqhg naartsgqts
481 ansnssrsha vfqivlrpqg stkihgkfsf idlagnergv dtssadrqtr megaeinksl
541 lalkeciral gkqsahlpfr vskltqvlrd sfigeksktc miamispgls scehtlntlr
601 yadrvkelvv kdivevcpgg dtepieitdd eeeeelnmvh phshqlhpns hapasqsnnq
661 rapashhsga vihnnnnnnn kngnagnmdl amlsslsehe msdelivqhq aiddlqqtee
721 mvveyhrtvn atletflaes kalynltnyv dydqdsyckr gesmfsqlld iaiqcrdmma
781 eyraklakee mlscsfnspn gkr
CG18292-novel
(SEQ ID NO:144)
CGTAATAACGCCTCCTGATATCGATATCGATATCATATCACAAAAAACAA
TAAACCAAAAAAGAAACGCTAAAAACTAGTAGTTTTGTGTGCCAGGAAAA
CGGAAAGGTGGACATAGTTAAGTTACCACAACAACCGACGGATATCGACT
CCAGACACCACATCGCCCAGCGCCACCATGGACATCATGGATATCCAGGC
CGTAGAGTCCAAGCTGAGTGACGTCACGGTGACACCGATACCGCGCAGCC
AAGTGCAGAATTTCTACAATTACCAGCAGCAGCGGGAGCAGCGCGAGCAG
CAGCCCCAAATCCAGATATCGGCCATCCACCACTCGCGTGGATCCGTTGG
CGGAGGAGGCGGATCCAACTCATCCAACGCTGCCACCGACTACTCCACGA
GCAGCGGTGGCAAGCGGGAGCGGGACCGCTCCTCCGCCAGCGACTACAGC
AGCTCGTCCAGCAAGCAGAGCTCCGCTGCAGCGGCCAATGCAGCAGCAGC
TGCCGCCGCCGTCGCTGCCCTCCAATACTCCCCGCAGTTCCTCCAGGCCC
AGCTGGCGCTACTCCAGCAGCAGTCGAACACGACGGCCACGCCGGCAGCC
GTCGCCGCTGCGGCCCTCTCGCTGGCCAACATGTGCTCCAGCAATGGTGG
TCAGCGGAATTCCGGTGCCGGCGTTTCCTCCACCTCCTCTGGCAGCAATG
GCCAGAGCATGGGCCTGAATCTGAGCTCATCGCAGCTAAAGTACCCGCCA
CCCTCCACCTCGCCCGTGGTGGTGACCACCCAAACTTCGGCCAATATCAC
CACGCCGCTGACCTCCACGGCCAGCCTGCCCTCAGTGGGCCCGGGCAATG
GGCTGACCAAGTACGCCCAGCTGCTGGCCGTCATTGAGGAGATGGGCCGC
GATATCCGGCCCACGTACACGGGCTCGCGCAGCTCCACGGAGCGTCTCAA
GCGGGGCATTGTCCATGCCCGCATCCTGGTGCGCGAATGCCTCATGGAAA
CGGAGCGTGCGGCGCGCCAATGA
(SEQ ID NO:145)
    1 mdiqaveskl sdvtvtpipr sqvqnfynyq qqreqreqqp qiqisaihhs rgsvgggggs
  61 nssnaatdys tssggkrerd rssasdysss sskqssaaaa naaaaaaava alqyspqflq
121 aqlallqqqs nttatpaava aaalslanmc ssnggqrnsg agvsstssgs ngqsmglnls
181 ssqlkyppps tspvvvttqt sanittplts taslpsvgpg ngltkyaqll avieemgrdi
241 rptytgsrss terlkrgivh arilvreclm eteraarq
```

[0516] Human homologue of Complete Genome candidate

[0517] (CG1453)—CAA69621—kinesin-2

```
(SEQ ID NO:146)
      1 ggccgaatac atcaagcaat ggtaacatct ttaaatgaag ataatgaaag tgtaactgtt
    61 gaatggatag aaaatggaga tacaaaaggc aaagagattg acctggagag catcttttca
  121 cttaaccctg accttgttcc tgatgaagaa attgaaccca gtccagaaac acctccacct
  181 ccagcatcct cagccaaagt aaacaaaatt gtaaagaatc gacggactgt agcttctatt
  241 aagaatgacc ctccttcaag agataataga gtggttggtt cagcacgtgc acggcccagt
  301 caatttcctg aacagtcttc ctctgcacaa cagaatggta gtgtttcaga tatatctcca
  361 gttcaagctg caaaaaagga atttggaccc ccttcacgta gaaaatctaa ttgtgtgaaa
  421 gaagtagaaa aactgcaaga aaaacgagag aaaaggagat tgcaacagca agaacttaga
  481 gaaaaaagag cccaggacgt tgatgctaca aacccaaatt atgaaattat gtgtatgatc
  541 agagacttta gaggaagttt ggattataga ccattaacaa cagcagatcc tattgatgaa
  601 cataggatat gtgtgtgtgt aagaaaacga ccactcaata aaaaagaaac tcaaatgaaa
  661 gatcttgatg taatcacaat tcctagtaaa gatgttgtga tggtacatga accaaaacaa
  721 aaagtagatt taacaaggta cctagaaaac caaacatttc gttttgatta tgcctttgat
  781 gactcagctc ctaatgaaat ggtttacagg tttactgcta aaccactagt ggaaactata
  841 tttgaaaggg gaatggctac atgctttgct tatgggcaga ctggaagtgg aaaaactcat
  901 actatgggtg gtgacttttc aggaaagaac caagattgtt ctaaaggaat ttatgcatta
  961 gcagctcgag atgtcttttt aatgctaaag aagccaaact ataagaagct agaacttcaa
1021 gtatatgcaa ccttctttga aatttatagt ggaaaggtgt ttgacttgct aaacaggaaa
1081 acaaaattaa gagttctaga agatggaaaa cagcaggttc aagtggtggg attacaggaa
1141 cgggaggtca aatgtgttga agatgtactg aaactcattg acataggcaa cagttgcaga
1201 acatccggtc aaacatctgc aaatgcacat tcatctcgga gccatgcagt gtttcagatt
1261 attcttagaa ggaaaggaaa actacatggc aaattttctc tcattgattt ggctggaaat
1321 gaaagaggag ctgatacttc cagtgcggac aggcaaacta ggcttgaagg tgctgaaatt
1381 aataaaagcc ttttagcact caaggagtgc atcagagcct taggtagaaa taaacctcat
1441 actcctttcc gtgcaagtaa actcactcag gtgttaagag attctttcat aggtgaaaac
1501 tctcgtacct gcatgattgc cacaatctct ccaggaatgg catcctgtga aaatactctt
1561 aatacattaa gatatgcaaa tagggtcaaa gaattgactg tagatccaac tgctgctggt
1621 gatgttcgtc caataatgca ccatccacca aaccagattg atgacttaga gacacagtgg
1681 ggtgtgggga gttcccctca gagagatgat ctaaaacttc tttgtgaaca aaatgaagaa
1741 gaagtctctc cacagttgtt tactttccac gaagctgttt cacaaatggt agaaatggaa
1801 gaacaagttg tagaagatca cagggcagtg ttccaggaat ctattcggtg gttagaagat
1861 gaaaaggccc tcttagagat gactgaagaa gtagattatg atgtcgattc atatgctaca
1921 caacttgaag ctattcttga gcaaaaaata gacattttaa ctgaactgcg ggataaagtg
1981 aaatctttcc gtgcagctct acaagaggag gaacaagcca gcaagcaaat caacccgaag
2041 agaccccgtg ccctttaaac cggcatttgc tgctaaagga tacccagaac cctcactact
2101 gtaacataca acggttcagc tgtaagggcc atttgaaagt ttggaatttt aagtgtctgt
2161 ggaaaatgtt ttgtccttca cctgaattac atttcaattt tgtgaaacac tcttttgtct
2221 acaaaatgct tctagtccag gaggcacaac caagaactgg gattaatgaa gcattttgtt
2281 tcatttacac aaatagtgat ttacttttgg agatccttgt cagttttatt ttctatttga
2341 tgaagtaaga ctgtggactc aatccagagc cagatagtag gggaagccac agcatttcct
2401 tttaactcag ttcaattttt gtagtgagac tgagcagttt taaatccttt gcgtgcatgc
2461 atacctcatc agtgattgta cataccttgc ccactcctag agacagctgt gctcactttt
2521 cctgctttgt gccttgatta aggctactga ccctaaattt ctgaagcaca gccaagaaaa
2581 attacattcc ttgtcattgt aaattacctt tgtgtgtaca tttttactgt atttgagaca
2641 ttttttgtgt gtgactagtt aattttgcag gatgtgccat atcattgaac ggaactaaag
2701 tctgtgacag tggatatagc tgctggacca ttccatctta tatgtaaaga aatctggaat
2761 tattatttta aaaccatata acatgtgatt ataatttttc ttagcatttt ctttgtaaag
2821 aactacaata taaactagtt ggtgtataat aaaaagtaat gaaattctga agaaaaaaaa
2881 aaaaaaaaaa aaaaaaaaaa aaaaa
(SEQ ID NO:147)
      1 mvtslnedne svtvewieng dtkgkeidle sifslnpdlv pdeeiepspe tppppassak
    61 vnkivknrrt vasikndpps rdnrvvgsar arpsqfpeqs ssaqqngsvs dispvqaakk
  121 efgppsrrks ncvkeveklq ekrekrrlqq qelrekraqd vdatnpnyei mcmirdfrgs
  181 ldyrpittad pidehricvc vrkrplnkke tqmkdldvit ipskdvvmvh epkqkvdltr
  241 ylenqtfrfd yafddsapne mvyrftakpl vetifergma tcfaygqtgs gkthtmggdf
  301 sgknqdcskg iyalaardvf lmlkkpnykk lelqvyatff eiysgkvfdl lnrktklrvl
  361 edgkqqvqvv glqerevkcv edvlklidig nscrtsgqts anahssrsha vfqiilrrkg
  421 klhgkfslid lagnergadt ssadrqtrle gaeinkslla lkeciralgr nkphtpfras
  481 kltqvlrdsf igensrtcmi atispgmasc entlntlrya nrvkeltvdp taagdvrpim
  541 hhppnqiddl etqwgvgssp qrddlkllce qneeevspql ftfheavsqm vemeeqvved
  601 hravfqesir wledekalle mteevdydvd syatqleail eqkidiltel rdkvksfraa
  661 lqeeeqaskq inpkrpral
```

[0518] (CG18292)—BAA22937—cdk2-associated protein 1; cdk2ap1, deleted in oral cancer 1 (doc-1, alias DORC1)

```
(SEQ ID NO:148)
      1 accgcccggc ctcgccgccg ccgccgccgc cctcgcggcc tggccccgcc gcgcccggcg
    61 cgcccgccgc ccggggggat gtcttacaaa ccgaacttgg ccgcgcacat gcccgccgcc
  121 gccctcaacg ccgctgggag tgtccactcg ccttccacca gcatggcaac gtcttcacag
  181 taccgccagc tgctcagtga ctacgggcca ccgtccctag gctacaccca gggaactggg
  241 aacagccagg tgccccaaag caaatacgcg gagctgctgg ccatcattga agagctgggg
  301 aaggagatca gacccacgta cgcagggagc aagagtgcca tggagaggct gaagcgcggc
  361 atcattcacg ctagaggact ggttcgggag tgcttggcag aaacggaacg gaatgccaga
  421 tcctagctgc cttgttggtt ttgaaggatt tccatctttt tacaagatga gaagttacag
  481 ttcatctccc ctgttcagat gaaacccttg ttttcaaaat ggttacagtt tcgtttttcc
  541 tcccatggtt cacttggctc tgaacctaca gtctcaaaga ttgagaaaag attttgcagt
  601 taattaggat ttgcatttta agtagttagg aactgcccag gttttttttg ttttttaagc
  661 attgatttaa aagatgcacg gaaagttatc ttacagcaaa ctgtagtttg cctccaagac
  721 accattgtct ccctttaatc ttctcttttg tatacatttg ttacccatgg tgttctttgt
  781 tccttttcat aagctaatac cactgtaggg attttgtttt gaacgcatat tgacagcacg
  841 ctttacttag tagccggttc ccatttgcca tacaatgtag gttctgctta atgtaacttc
  901 ttttttgctt aagcatttgc atgactatta gtgcttcaaa gtcaattttt aaaaatgcac
  961 aagttataaa tacagaagaa agagcaaccc accaaaccta acaaggaccc ccgaacactt
1021 tcatactaag actgtaagta gatctcagtt ctgcgtttat tgtaagttga taaaaacatc
1081 tgggaggaaa tgactaaaac tgtttgcatc tttgtatgta tttattactt gatgtaataa
1141 agcttatttt cattaacc
(SEQ ID NO:149)
      1 msykpnlaah mpaaalnaag svhspstsma tssqyrqlls dygppslgyt qgtgnsqvpq
    61 skyaellaii eelgkeirpt yagsksamer lkrgiiharg lvreclaete mars
```

[0519] Putative function
[0520] (CG1453)—Motor protein
[0521] (CG18292)—Cdk2 associated, candidate tumor supressor

### Example 9A

### Category 2

[0522] Line ID—ms(l)13

[0523] Phenotype—Male sterile, Cytokinesis defect: variable sized Nebenkerns with 4N nuclei, some nuclei detached from Nebenkern

[0524] Annotated Drosophila genome genomic segment containing P element insertion site (and map position)—AE003436 (5D1)

[0525] P element insertion site sequence

(SEQ ID NO:150)

CATCATGTATCATACATTGAAGACGGATTAGCACCGTCGACCACGAAAAA
AGAACGCAAGGAAATCGTGCAAAATGTTCAAAAAGTACGTATGGCATGAG
TTAGATGGGGACATCAGACTAACCATAGCAATTCGATCTGTGCAGATTCG
AAGAGAAGGACAGCATTTCCAGCATTCAGCAGCTGAAGTCGTCTGTGCAG
AAGGGCATACGTGCCAAGTTGCTGGAGGCCTATCCCAAGTTGGAGAGTCA
CATCGACCTGATCCTGCCCAAGAAGGACTCGTACCGCATCGCCAAGTGGT
AGGATGGCTCAGTTCTTGCCACAGCACATAACTCCATTCATATTCCCGAT
CCCTACTCCTCCACCAGCCATGACCACATCGAACTGCTGCTAAACGGAGC
CGGCGACCAGGTGTTCTTTCGCCACCGCGATGGCCCCTGGATGCCTACCC
TGCGCAACTGTTGGGAAGGGCGATCGGTGCGGGCCTCTTCGCTATTACGC
CAGCTGGCGAAAGGGGGGATGTGCTGCAAGGCGATTAAGTTGGGTAACGC
CAGGGTTTTCCCAGNCACGACGTTGNAAAACGACGGNCANNGCCAAGCTC
TGCTGCT

[0526] Annotated Drosophila genome Complete Genome candidate

[0527] CG594 1—novel protein with a PUA domain

(SEQ ID NO:151)

CGGATTAGCACCGTCGACCACGAAAAAAGAACGCAAGGAAATCGTGCAAA
ATGTTCAAAAAATTCGAAGAGAAGGACAGCATTTCCAGCATTCAGCAGCT
GAAGTCGTCTGTGCAGAAGGGCATACGTGCCAAGTTGCTGGAGGCCTATC
CCAAGTTGGAGAGTCACATCGACCTGATCCTGCCCAAGAAGGACTCGTAC
CGCATCGCCAAGTGCCATGACCACATCGAACTGCTGCTAAACGGAGCCGG
CGACCAGGTGTTCTTTCGCCACCGCGATGGCCCCTGGATGCCTACCCTGC
GCCTCCTGCACAAGTTCCCCTACTTCGTGACCATGCAGCAAGTGGACAAA
GGCGCCATCCGCTTCGTCCTGAGCGGAGCGAACGTCATGTGTCCCGGCCT
CACATCGCCAGGCGCCTGTATGACGCCGGCCGACAAGGACACCGTGGTGG
CCATCATGGCTGAGGGCAAGGAGCACGCCCTGGCCGTTGGACTCCTCACG
TTATCCACACAGGAAATTCTGGCGAAGAACAAAGGCATCGGTATCGAGAC
GTACCACTTCCTCAACGACGGCCTGTGGAAGTCGAAGCCCGTGAAGTAGG
CGAAATAGGAATCTGCACTTGCACTTTTTA

(SEQ ID NO:152)

MFKKFEEKDSISSIQQLKSSVQKGIRAKLLEAYPKLESHIDLILPKKDSY
RIAKCHDHIELLLNGAGDQVFFRHRDGPWMPTLRLLHKFPYFVTMQQVDK
GAIRFVLSGANVMCPGLTSPGACMTPADKDTVVAIMAEGKEHALAVGLLT
LSTQEILAKNKGIGIETYHFLNDGLWKSKPVK

[0528] Human homologue of Complete Genome candidate

[0529] MCT-1(multiple copies in a T-cell malignancies) (BAA86055), a novel candidate oncogene involved in cell cycle which has a domain similar to cyclin H

```
(SEQ ID NO:153)
    1 gctacctcca actgctgagg aaccggttgc ctaaaaggag ccggcaaaag cgcctacgtg
  61 gagtccagag gagcggaagt agtcagattt gactgagagc cgtaaagcgc ggctggctct
121 cgttttccgg ataacgacta cagctccgac tgtcagtgcc ggccttcctc gtgtgagggg
181 atctgccgga cccctgcaaa ttcaatttct ttcccattcc gggcccttcc ctatcgtcgc
241 ccccttcacc ttggatcatg ttcaagaaat ttgatgaaaa agaaaatgtg tccaactgca
301 tccagttgaa aacttcagtt attaagggta ttaagaatca attgatagag caatttccag
361 gtattgaacc atggcttaat caaatcatgc ctaagaaaga tcctgtcaaa atagtccgat
421 gccatgaaca tatagaaatc cttacagtaa atggagaatt actctttttt agacaaagag
481 aagggccttt ttatccaacc ctaagattac ttcacaaata tccttttatc ctgccacacc
541 agcaggttga taaaggagcc atcaaatttg tactcagtgg agcaaatatc atgtgtccag
601 gcttaacttc tcctggagct aagctttacc ctgctgcagt agataccatt gttgctatca
661 tggcagaagg aaaacagcat gctctatgtg ttggagtcat gaagatgtct gcagaagaca
721 ttgagaaagt caacaaagga attggcattg aaaatatcca ttatttaaat gatgggctgt
781 ggcatatgaa gacatataaa tgagcctcag aaggaatgca cttgggctaa atatggatat
841 tgtgctgtat ctgtgtttgt gtctgtgtgt gacagcatga agataatgcc tgtggttatg
901 ctgaataaat tcaccagatg ctaaaaaaaa aaaaaaaaaa aaa
(SEQ ID NO:154)
    1 mfkkfdeken vsnciqlkts vikgiknqli eqfpgiepwl nqimpkkdpv kivrchehie
  61 iltvngellf frqregpfyp tlrllhkypf ilphqqvdkg aikfvlsgan imcpgltspg
121 aklypaavdt ivaimaegkq halcvgvmkm saediekvnk gigienihyl ndglwhmkty
181 k
```

[0530] Putative function
[0531] Role in cell cycle progression

### Category 3—Mitotic (Neuroblast) Phenotypes

### Example 10

### Category 3

[0532] Line ID—187

[0533] Phenotype—lethal phase between pupil and pharate adult (P-pA). High mitotic index, rod-like overcondensed chromosomes, a few circular metaphases, many overcondensed anaphases and telophases, a few tetraploid cells

[0534] Annotated Drosophila genome genomic segment containing P element insertion site (and map position)—AE003445 (8B3-7)

[0535] P element insertion site—174,362

[0536] Annotated Drosophila genome Complete Genome candidate

[0537] CG10701 moesin, cytoskeletal binding protein (4 splice variants)

(SEQ ID NO:155)

ACGCCGCATGCACTTTTTTATCTATGATATTATGTTTATTATTTCATTAT
TGAATCGGGAAAACCAAACGTTTTTTTTTTTTTCGTATACAAATCCATTT
GCAGTTTGTAAACTTTAGCGTGCATTCGCATCTAATAGTGATATGTTTTC
GCTTTTCACAGGTGATGAACCAGGACGTGAAGAAGGAGAATCCCTTGCAG
TTTAGGTTCCGTGCCAAATTCTATCCCGAGGATGTGGCCGAGGAGCTGAT
CCAGGACATTACACTGCGTCTGTTCTACCTGCAGGTGAAGAATGCCATAC
TGACCGACGAGATCTATTGTCCGCCAGAGACATCCGTGCTGCTCGCCTCG
TACGCCGTCCAGGCGCGTCATGGTGACCACAATAAGACCACCCACACAGC
CGGCTTTCTGGCCAACGATCGCCTGCTGCCGCAGCGCGTCATCGACCAGC
ACAAGATGTCCAAGGACGAGTGGGAGCAGTCGATTATGACCTGGTGGCAG
GAGCATCGCAGCATGCTGCGCGAGGATGCCATGATGGAGTATCTGAAGAT
CGCCCAAGACCTGGAGATGTACGGCGTTAACTACTTTGAGATCCGCAACA
AGAAGGGCACGGATCTTTGGCTGGGCGTAGACGCACTGGGTCTGAACATT
TACGAGCAGGACGATAGGTTGACGCCGAAAATTGGTTTCCCATGGTCCGA
GATTCGCAACATTTCGTTCTCGGAGAAGAAGTTCATCATCAAGCCGATCG
ACAAGAAGGCTCCGGACTTTATGTTCTTTGCGCCACGTGTCCGCATCAAC
AAGCGCATTCTGGCCCTCTGCATGGGCAACCACGAGCTGTACATGCGTCG
CCGCAAGCCGGACACCATCGATGTGCAGCAGATGAAGGCGCAGGCGCGCG
AGGAGAAGAATGCCAAACAGCAGGAACGTGAGAAGCTGCAGCTGGCGCTG
GCCGCACGCGAACGCGCTGAAAAGAAGCAGCAGGAGTACGAGGATCGGCT
AAAGCAGATGCAGGAGGACATGGAGCGTTCGCAGCGCGATCTGCTTGAGG
CGCAGGACATGATCCGCCGGCTGGAGGAGCAGCTGAAGCAGCTGCAGGCC
GCCAAGGATGAGCTGGAGCTGCGCCAGAAGGAGCTGCAGGCGATGCTGCA
GCGCCTCGAGGAGGCCAAGAATATGGAGGCCGTCGAGAAGCTCAAGCTCG
AGGAGGAGATCATGGCCAAGCAGATGGAGGTGCAGCGCATTCAGGACGAG
GTCAACGCCAAGGATGAGGAGACAAAGCGTCTGCAGGACGAAGTGGAAGA
CGCCCGACGCAAGCAGGTCATTGCGGCTGAAGCCGCTGCCGCTCTGCTGG
CCGCGTCGACAACGCCGCAGCATCACCACGTGGCCGAGGATGAGAACGAG
AACGAGGAGGAGCTGACGAACGGCGATGCCGGTGGCGATGTGTCGCGCGA
CCTGGACACCGACGAGCATATCAAGGACCCCATCGAGGACAGACGCACGC
TGGCCGAGCGCAACGAACGCTTGCACGATCAGCTCAAGGCTCTGAAACAA
GATTTGGCGCAGTCTCGCGACGAGACGAAAGAGACGGCAAACGATAAGAT
TCATCGCGAGAACGTTCGCCAGGGACGTGACAAGTACAAGACGCTCCGCG
AGATTCGTAAGGGCAACACAAAGCGTCGCGTCGATCAGTTTGAGAACATG
TAAAAGCTATCAAAGATCAGAGATCGATAGTGCGCGGGAAAGAGAGAGGG
AGCGGTGAGACTCCAGAAAGA

(SEQ ID NO:156)

MNQDVKKENPLQFRFRAKFYPEDVAEELIQDITLRLFYLQVKNAILTDEI
YCPPETSVLLASYAVQARHGDHNKTTHTAGFLANDRLLPQRVIDQHKMSK
DEWEQSIMTWWQEHRSMLREDAMMEYLKIAQDLEMYGVNYFEIRNKKGTD
LWLGVDALGLNIYEQDDRLTPKIGFPWSEIRNISFSEKKFIIKPIDKKAP
DFMFFAPRVRINKRILALCMGNHELYMRRRKPDTIDVQQMKAQAREEKNA
KQQEREKLQLALAARERAEKKQQEYEDRLKQMQEDMERSQRDLLEAQDMI
RRLEEQLKQLQAAKDELELRQKELQAMLQRLEEAKNMEAVEKLKLEEEIM
AKQMEVQRIQDEVNAKDEETKRLQDEVEDARRKQVIAAEAAAALLAASTT
PQHHHVAEDENENEEELTNGDAGGDVSRDLDTDEHIKDPIEDRRTLAERN
ERLHDQLKALKQDLAQSRDETKETANDKIHRENVRQGRDKYKTLREIRKG
NTKRRVDQFENM

(SEQ ID NO:157)

GACAACAGAATCGAATCGTCGCTTTTCCGCTTTTAACCATCGTGTCGCGT
TGGTCGGTTGGTTTTCCCGCGTAGCTTGTGGCTGCTCAAGAATATATATA
TATTTCCCAGACGGAGATTTGCATTGAAAAGGCGTAATAATTCAAAAGCT
ACTGCGCAATCCGTTTTCGGTGCCCAAAATGGTCGTCGTCTCCGACAGCC
GCGTCCGTTTGCCGCGTTACGGCGGAGTCAGCGTCAAACGGAAAACGCTA
AATGTGCGCGTCACGACAATGGACGCGGAACTGGAGTTCGCCATTCAGTC
GACGACGACGGGCAAGCAATTGTTTGACCAGGTGGTGAAGACGATCGGCC
TGCGAGAGGTTTGGTTCTTTGGACTCCAGTACACCGACTCCAAGGGCGAC
TCCACATGGATCAAGCTGTACAAAAAGCCCGAATCGCCGGCCATAAAGAC
AATAAAATATTTAAAGCGTGTAAAGAAGTATGTGGACAAAAAGACAGCCG
ACAGCAATGGAGTAAATCATTTAGAGACGAGCGAAGAGGATGACGACGCC
GATGATATGACTGGATCAATGCCGTTTTCGACATGGGTGATGAACCAGGA
CGTGAAGAAGGAGAATCCCTTGCAGTTTAGGTTCCGTGCCAAATTCTATC
CCGAGGATGTGGCCGAGGAGCTGATCCAGGACATTACACTGCGTCTGTTC
TACCTGCAGGTGAAGAATGCCATACTGACCGACGAGATCTATTGTCCGCC
AGAGACATCCGTGCTGCTCGCCTCGTACGCCGTCCAGGCGCGTCATGGTG
ACCACAATAAGACCACCCACACAGCCGGCTTTCTGGCCAACGATCGCCTG
CTGCCGCAGCGCGTCATCGACCAGCACAAGATGTCCAAGGACGAGTGGGA
GCAGTCGATTATGACCTGGTGGCAGGAGCATCGCAGCATGCTGCGCGAGG
ATGCCATGATGGAGTATCTGAAGATCGCCCAAGACCTGGAGATGTACGGC
GTTAACTACTTTGAGATCCGCAACAAGAAGGGCACGGATCTTTGGCTGGG
CGTAGACGCACTGGGTCTGAACATTTACGAGCAGGACGATAGGTTGACGC
CGAAAATTGGTTTCCCATGGTCCGAGATTCGCAACATTTCGTTCTCGGAG
AAGAAGTTCATCATCAAGCCGATCGACAAGAAGGCTCCGGACTTTATGTT
CTTTGCGCCACGTGTCCGCATCAACAAGCGCATTCTGGCCCTCTGCATGG
GCAACCACGAGCTGTACATGCGTCGCCGCAAGCCGGACACCATCGATGTG
CAGCAGATGAAGGCGCAGGCGCGCGAGGAGAAGAATGCCAAACAGCAGGA
ACGTGAGAAGCTGCAGCTGGCGCTGGCCGCACGCGAACGCGCTGAAAAGA
AGCAGCAGGAGTACGAGGATCGGCTAAAGCAGATGCAGGAGGACATGGAG
CGTTCGCAGCGCGATCTGCTTGAGGCGCAGGACATGATCCGCCGGCTGGA
GGAGCAGCTGAAGCAGCTGCAGGCCGCCAAGGATGAGCTGGAGCTGCGCC
AGAAGGAGCTGCAGGCGATGCTGCAGCGCCTCGAGGAGGCCAAGAATATG
GAGGCCGTCGAGAAGCTCAAGCTCGAGGAGGAGATCATGGCCAAGCAGAT
GGAGGTGCAGCGCATTCAGGACGAGGTCAACGCCAAGGATGAGGAGACAA
AGCGTCTGCAGGACGAAGTGGAAGACGCCCGACGCAAGCAGGTCATTGCG
GCTGAAGCCGCTGCCGCTCTGCTGGCCGCGTCGACAACGCCGCAGCATCA
CCACGTGGCCGAGGATGAGAACGAGAACGAGGAGGAGCTGACGAACGGCG
ATGCCGGTGGCGATGTGTCGCGCGACCTGGACACCGACGAGCATATCAAG
GACCCCATCGAGGACAGACGCACGCTGGCCGAGCGCAACGAACGCTTGCA
CGATCAGCTCAAGGCTCTGAAACAAGATTTGGCGCAGTCTCGCGACGAGA
CGAAAGAGACGGCAAACGATAAGATTCATCGCGAGAACGTTCGCCAGGGA
CGTGACAAGTACAAGACGCTCCGCGAGATTCGTAAGGGCAACACAAAGCG
TCGCGTCGATCAGTTTGAGAACATGTAAAAGCTATCAAAGATCAGAGATC
GATAGTGCGCGGGAAAGAGAGAGGGAGCGGTGAGACTCCAGAAAGA

(SEQ ID NO:158)

MVVVSDSRVRLPRYGGVSVKRKTLNVRVTTMDAELEFAIQSTTTGKQLFD
QVVKTIGLREVWFFGLQYTDSKGDSTWIKLYKKPESPAIKTIKYLKRVKK
YVDKKTADSNGVNHLETSEEDDDADDMTGSMPFSTWVMNQDVKKENPLQF
RFRAKFYPEDVAEELIQDITLRLFYLQVKNAILTDEIYCPPETSVLLASY
AVQARHGDHNKTTHTAGFLANDRLLPQRVIDQHKMSKDEWEQSIMTWWQE
HRSMLREDAMMEYLKIAQDLEMYGVNYFEIRNKKGTDLWLGVDALGLNIY
EQDDRLTPKIGFPWSEIRNISFSEKKFIIKPIDKKAPDFMFFAPRVRINK
RILALCMGNHELYMRRRKPDTIDVQQMKAQAREEKNAKQQEREKLQLALA
ARERAEKKQQEYEDRLKQMQEDMERSQRDLLEAQDMIRRLEEQLKQLQAA
KDELELRQKELQAMLQRLEEAKNMEAVEKLKLEEEIMAKQMEVQRIQDEV
NAKDEETKRLQDEVEDARRKQVIAAEAAAALLAASTTPQHHHVAEDENEN
EEELTNGDAGGDVSRDLDTDEHIKDPIEDRRTLAERNERLHDQLKALKQD
LAQSRDETKETANDKIHRENVRQGRDKYKTLREIRKGNTKRRVDQFENM

(SEQ ID NO:159)

CCAAAGCGAAACGGGAGCTCTTGGCACGTGCCCTGCTCACATCCCGTTAA
TCCATCGACCCCTAAACAAATCGTGGGGGATTCTCCTCTGCACGCCACCT
TCATCGATGGGTGTCAATTTTTTACTCTTTTTTTTTTCTATTTGGCTTCT
AAATGTGCGCGTCACGACAATGGACGCGGAACTGGAGTTCGCCATTCAGT
CGACGACGACGGGCAAGCAATTGTTTGACCAGGTGGTGAAGACGATCGGC
CTGCGAGAGGTTTGGTTCTTTGGACTCCAGTACACCGACTCCAAGGGCGA
CTCCACATGGATCAAGCTGTACAAAAAGCCCGAATCGCCGGCCATAAAGA
CAATAAAATATTTAAAGCGTGTAAAGAAGTATGTGGACAAAAAGACAGCC
GACAGCAATGGAGTAAATCATTTAGAGACGAGCGAAGAGGATGACGACGC
CGATGATATGACTGGATCAATGCCGTTTTCGACATGGGTGATGAACCAGG
ACGTGAAGAAGGAGAATCCCTTGCAGTTTAGGTTCCGTGCCAAATTCTAT
CCCGAGGATGTGGCCGAGGAGCTGATCCAGGACATTACACTGCGTCTGTT
CTACCTGCAGGTGAAGAATGCCATACTGACCGACGAGATCTATTGTCCGC
CAGAGACATCCGTGCTGCTCGCCTCGTACGCCGTCCAGGCGCGTCATGGT
GACCACAATAAGACCACCCACACAGCCGGCTTTCTGGCCAACGATCGCCT
GCTGCCGCAGCGCGTCATCGACCAGCACAAGATGTCCAAGGACGAGTGGG
AGCAGTCGATTATGACCTGGTGGCAGGAGCATCGCAGCATGCTGCGCGAG
GATGCCATGATGGAGTATCTGAAGATCGCCCAAGACCTGGAGATGTACGG
CGTTAACTACTTTGAGATCCGCAACAAGAAGGGCACGGATCTTTGGCTGG
GCGTAGACGCACTGGGTCTGAACATTTACGAGCAGGACGATAGGTTGACG
CCGAAAATTGGTTTCCCATGGTCCGAGATTCGCAACATTTCGTTCTCGGA
GAAGAAGTTCATCATCAAGCCGATCGACAAGAAGGCTCCGGACTTTATGT
TCTTTGCGCCACGTGTCCGCATCAACAAGCGCATTCTGGCCCTCTGCATG
GGCAACCACGAGCTGTACATGCGTCGCCGCAAGCCGGACACCATCGATGT
GCAGCAGATGAAGGCGCAGGCGCGCGAGGAGAAGAATGCCAAACAGCAGG
AACGTGAGAAGCTGCAGCTGGCGCTGGCCGCACGCGAACGCGCTGAAAAG
AAGCAGCAGGAGTACGAGGATCGGCTAAAGCAGATGCAGGAGGACATGGA
GCGTTCGCAGCGCGATCTGCTTGAGGCGCAGGACATGATCCGCCGGCTGG
AGGAGCAGCTGAAGCAGCTGCAGGCCGCCAAGGATGAGCTGGAGCTGCGC
CAGAAGGAGCTGCAGGCGATGCTGCAGCGCCTCGAGGAGGCCAAGAATAT
GGAGGCCGTCGAGAAGCTCAAGCTCGAGGAGGAGATCATGGCCAAGCAGA
TGGAGGTGCAGCGCATTCAGGACGAGGTCAACGCCAAGGATGAGGAGACA
AAGCGTCTGCAGGACGAAGTGGAAGACGCCCGACGCAAGCAGGTCATTGC
GGCTGAAGCCGCTGCCGCTCTGCTGGCCGCGTCGACAACGCCGCAGCATC
ACCACGTGGCCGAGGATGAGAACGAGAACGAGGAGGAGCTGACGAACGGC
GATGCCGGTGGCGATGTGTCGCGCGACCTGGACACCGACGAGCATATCAA
GGACCCCATCGAGGACAGACGCACGCTGGCCGAGCGCAACGAACGCTTGC
ACGATCAGCTCAAGGCTCTGAAACAAGATTTGGCGCAGTCTCGCGACGAG
ACGAAAGAGACGGCAAACGATAAGATTCATCGCGAGAACGTTCGCCAGGG
ACGTGACAAGTACAAGACGCTCCGCGAGATTCGTAAGGGCAACACAAAGC
GTCGCGTCGATCAGTTTGAGAACATGTAAAAGCTATCAAAGATCAGAGAT
CGATAGTGCGCGGGAAAGAGAGAGGGAGCGGTGAGACTCCAGAAAGA

(SEQ ID NO:160)

MGVNFLLFFFSIWLLNVRVTTMDAELEFAIQSTTTGKQLFDQVVKTIGLR
EVWFFGLQYTDSKGDSTWIKLYKKPESPAIKTIKYLKRVKKYVDKKTADS
NGVNHLETSEEDDDADDMTGSMPFSTWVMNQDVKKENPLQFRFRAKFYPE
DVAEELIQDITLRLFYLQVKNAILTDEIYCPPETSVLLASYAVQARHGDH
NKTTHTAGFLANDRLLPQRVIDQHKMSKDEWEQSIMTWWQEHRSMLREDA
MMEYLKIAQDLEMYGVNYFEIRNKKGTDLWLGVDALGLNIYEQDDRLTPK
IGFPWSELRNISFSEKKFIIKPIDKKAPDFMFFAPRVRINKRILALCMGN
HELYMRRRKPDTIDVQQMKAQAREEKNAKQQEREKLQLALAARERAEKKQ
QEYEDRLKQMQEDMERSQRDLLEAQDMIRRLEEQLKQLQAAKDELELRQK
ELQAMLQRLEEAKNMEAVEKLKLEEEIMAKQMEVQRJQDEVNAKDEETKR
LQDEVEDARRKQVIAAEAAAALLAASTTPQHHHVAEDENENEEELTNGDA
GGDVSRDLDTDEHIKDPIEDRRTLAERNERLHDQLKALKQDLAQSRDETK
ETANDKIHRENVRQGRDKYKTLREIRKGNTKRRVDQFENM

(SEQ ID NO:161)

AAAGCTCACGAAAAACACGCGGCAATTGGATAAGAAACGAAATTGTTGAT
CCAACGCGAGGAAGAAGAAGAATTGTGAAGCAAGAAGAAGCGAAAACAAA
CTGCGATTGCAGCACAAAAACAATAAAGAGTTCAGACGATAATATCCTGG
AAAGAAAACATTTCGTTTCGATAAGTACGACAAGACACGAAACAACAAAA
TGTCTCCAAAAGCGCTAAATGTGCGCGTCACGACAATGGACGCGGAACTG
GAGTTCGCCATTCAGTCGACGACGACGGGCAAGCAATTGTTTGACCAGGT
GGTGAAGACGATCGGCCTGCGAGAGGTTTGGTTCTTTGGACTCCAGTACA
CCGACTCCAAGGGCGACTCCACATGGATCAAGCTGTACAAAAAGGTGATG
AACCAGGACGTGAAGAAGGAGAATCCCTTGCAGTTTAGGTTCCGTGCCAA
ATTCTATCCCGAGGATGTGGCCGAGGAGCTGATCCAGGACATTACACTGC
GTCTGTTCTACCTGCAGGTGAAGAATGCCATACTGACCGACGAGATCTAT
TGTCCGCCAGAGACATCCGTGCTGCTCGCCTCGTACGCCGTCCAGGCGCG
TCATGGTGACCACAATAAGACCACCCACACAGCCGGCTTTCTGGCCAACG
ATCGCCTGCTGCCGCAGCGCGTCATCGACCAGCACAAGATGTCCAAGGAC
GAGTGGGAGCAGTCGATTATGACCTGGTGGCAGGAGCATCGCAGCATGCT
GCGCGAGGATGCCATGATGGAGTATCTGAAGATCGCCCAAGACCTGGAGA
TGTACGGCGTTAACTACTTTGAGATCCGCAACAAGAAGGGCACGGATCTT
TGGCTGGGCGTAGACGCACTGGGTCTGAACATTTACGAGCAGGACGATAG
GTTGACGCCGAAAATTGGTTTCCCATGGTCCGAGATTCGCAACATTTCGT
TCTCGGAGAAGAAGTTCATCATCAAGCCGATCGACAAGAAGGCTCCGGAC
TTTATGTTCTTTGCGCCACGTGTCCGCATCAACAAGCGCATTCTGGCCCT
CTGCATGGGCAACCACGAGCTGTACATGCGTCGCCGCAAGCCGGACACCA
TCGATGTGCAGCAGATGAAGGCGCAGGCGCGCGAGGAGAAGAATGCCAAA
CAGCAGGAACGTGAGAAGCTGCAGCTGGCGCTGGCCGCACGCGAACGCGC
TGAAAAGAAGCAGCAGGAGTACGAGGATCGGCTAAAGCAGATGCAGGAGG
ACATGGAGCGTTCGCAGCGCGATCTGCTTGAGGCGCAGGACATGATCCGC
CGGCTGGAGGAGCAGCTGAAGCAGCTGCAGGCCGCCAAGGATGAGCTGGA
GCTGCGCCAGAAGGAGCTGCAGGCGATGCTGCAGCGCCTCGAGGAGGCCA
AGAATATGGAGGCCGTCGAGAAGCTCAAGCTCGAGGAGGAGATCATGGCC
AAGCAGATGGAGGTGCAGCGCATTCAGGACGAGGTCAACGCCAAGGATGA
GGAGACAAAGCGTCTGCAGGACGAAGTGGAAGACGCCCGACGCAAGCAGG
TCATTGCGGCTGAAGCCGCTGCCGCTCTGCTGGCCGCGTCGACAACGCCG
CAGCATCACCACGTGGCCGAGGATGAGAACGAGAACGAGGAGGAGCTGAC
GAACGGCGATGCCGGTGGCGATGTGTCGCGCGACCTGGACACCGACGAGC
ATATCAAGGACCCCATCGAGGACAGACGCACGCTGGCCGAGCGCAACGAA
CGCTTGCACGATCAGCTCAAGGCTCTGAAACAAGATTTGGCGCAGTCTCG
CGACGAGACGAAAGAGACGGCAAACGATAAGATTCATCGCGAGAACGTTC
GCCAGGGACGTGACAAGTACAAGACGCTCCGCGAGATTCGTAAGGGCAAC
ACAAAGCGTCGCGTCGATCAGTTTGAGAACATGTAAAAGCTATCAAAGAT
CAGAGATCGATAGTGCGCGGGAAAGAGAGAGGGAGCGGTGAGACTCCAGA
AAGA

(SEQ ID NO:162)

MSPKALNVRVTTMDAELEFAIQSTTTGKQLFDQVVKTIGLREVWFFGLQY
TDSKGDSTWIKLYKKVMNQDVKKENPLQFRFRAKFYPEDVAEELIQDITL
RLFYLQVKNAILTDEIYCPPETSVLLASYAVQARHGDHNKTTHTAGFLAN
DRLLPQRVIDQHKMSKDEWEQSIMTWWQEHRSMLREDAMMEYLKIAQDLE
MYGVNYFEIRNKKGTDLWLGVDALGLNIYEQDDRLTPKIGFPWSEIRNIS
FSEKKFIIKPIDKKAPDFMFFAPRVRINKRILALCMGNHELYMRRRKPDT
IDVQQMKAQAREEKNAKQQEREKLQLALAARERAEKKQQEYEDRLKQMQE
DMERSQRDLLEAQDMIRRLEEQLKQLQAAKDELELRQKELQAMLQRLEEA
KNMEAVEKLKLEEEIMAKQMEVQRIQDEVNAKDEETKRLQDEVEDARRKQ
VIAAEAAAALLAASTTPQHHHVAEDENENEEELTNGDAGGDVSRDLDTDE
HIKDPIEDRRTLAERNERLHDQLKALKQDLAQSRDETKETANDKIHRENV
RQGRDKYKTLREIRKGNTKRRVDQFENM

[0538] Human homologue of Complete Genome candidate

[0539] A41289 human moesin

```
(SEQ ID NO:163)
      1 ggcacgaggc cagccgaatc caagccgtgt gtactgcgtg ctcagcactg cccgacagtc
    61 ctagctaaac ttcgccaact ccgctgcctt tgccgccacc atgcccaaaa cgatcagtgt
  121 gcgtgtgacc accatggatg cagagctgga gtttgccatc cagcccaaca ccaccgggaa
  181 gcagctattt gaccaggtgg tgaaaactat tggcttgagg gaagtttggt tctttggtct
  241 gcagtaccag gacactaaag gtttctccac ctggctgaaa ctcaataaga aggtgactgc
  301 ccaggatgtg cggaaggaaa gccccctgct ctttaagttc cgtgccaagt tctaccctga
  361 ggatgtgtcc gaggaattga ttcaggacat cactcagcgc ctgttctttc tgcaagtgaa
  421 agagggcatt ctcaatgatg atatttactg cccgcctgag accgctgtgc tgctggcctc
  481 gtatgctgtc cagtctaagt atggcgactt caataaggaa gtgcataagt ctggctacct
  541 ggccggagac aagttgctcc cgcagagagt cctggaacag cacaaactca acaaggacca
  601 gtgggaggag cggatccagg tgtggcatga ggaacaccgt ggcatgctca gggaggatgc
  661 tgtcctggaa tatctgaaga ttgctcaaga tctggagatg tatggtgtga actacttcag
  721 catcaagaac aagaaaggct cagagctgtg gctgggggtg gatgccctgg gtctcaacat
  781 ctatgagcag aatgacagac taactcccaa gataggcttc ccctggagtg aaatcaggaa
  841 catctctttc aatgataaga aatttgtcat caagcccatt gacaaaaaag ccccggactt
  901 cgtcttctat gctccccggc tgcggattaa caagcggatc ttggccttgt gcatggggaa
  961 ccatgaacta tacatgcgcc gtcgcaagcc tgataccatt gaggtgcagc agatgaaggc
1021 acaggcccgg gaggagaagc accagaagca gatggagcgt gctatgctgg aaaatgagaa
1081 gaagaagcgt gaaatggcag agaaggagaa agagaagatt gaacgggaga aggaggagct
1141 gatggagagg ctgaagcaga tcgaggaaca gactaagaag gctcagcaag aactggaaga
1201 acagacccgt agggctctgg aacttgagca ggaacggaag cgtgcccaga gcgaggctga
1261 aaagctggcc aaggagcgtc aagaagctga agaggccaag gaggccttgc tgcaggcctc
1321 ccgggaccag aaaaagactc aggaacagct ggccttggaa atggcagagc tgacagctcg
1381 aatctcccag ctggagatgg cccgacagaa gaaggagagt gaggctgtgg agtggcagca
1441 gaaggcccag atggtacagg aagacttgga gaagacccgt gctgagctga agactgccat
1501 gagtacacct catgtggcag agcctgctga gaatgagcag gatgagcagg atgagaatgg
1561 ggcagaggct agtgctgacc tacgggctga tgctatggcc aaggaccgca gtgaggagga
1621 acgtaccact gaggcagaga agaatgagcg tgtgcagaag cacctgaagg ccctcacttc
1681 ggagctggcc aatgccagag atgagtccaa gaagactgcc aatgacatga tccatgctga
1741 gaacatgcga ctgggccgag acaaatacaa gaccctgcgc cagatccggc agggcaacac
1801 caagcagcgc attgacgaat ttgagtctat gtaatgggca cccagcctct agggacccct
1861 cctccctttt tccttgtccc cacactccta cacctaactc acctaactca tactgtgctg
1921 gagccactaa ctagagcagc cctggagtca tgccaagcat ttaatgtagc catgggacca
1981 aacctagccc cttagccccc acccacttcc ctgggcaaat gaatggctca ctatggtgcc
2041 aatggaacct cctttctctt ctctgttcca ttgaatctgt atggctagaa tatcctactt
2101 ctccagccta gaggtacttt ccacttgatt ttgcaaatgc ccttacactt actgttgtcc
2161 tatgggagtc aagtgtggag taggttggaa gctagctccc ctcctctccc ctccactgtc
2221 ttcttcaggt cctgagatta cacggtggag tgtatgcggt ctaggaatga gacaggacct
2281 agatatcttc tccagggatg tcaactgacc taaaatttgc ecteccatec cgtttagagt
2341 tatttaggct ttgtaacgat tgggggaata aaaagatgtt cagtcatttt tgtttctacc
2401 tcccagatcg gatctgttgc aaactcagcc tcaataagcc ttgtcgttga ctttagggac
2461 tcaatttctc cccagggtgg atgggggaaa tggtgccttc aagaccttca ccaaacatac
2521 tagaagggca ttggccattc tattgtggca aggctgagta gaagatccta ccccaattcc
2581 ttgtaggagt ataggccggt ctaaagtgag ctctatgggc agatctaccc cttacttatt
2641 attccagatc tgcagtcact tcgtgggatc tgcccctccc tgcttcaata cccaaatcct
2701 ctccagctat aacagtaggg atgagtaccc aaaagctcag ccagccccat caggactctt
2761 gtgaaaagag aggatatgtt cacacctagc gtcagtattt tccctgctag gggttttagg
2821 tctcttcccc tctcagagct acttgggcca tagctcctgc tccacagcca tcccagcctt
2881 ggcatctaga gcttgatgcc agtaggctca actagggagt gagtgcaaaa agctgagtat
2941 ggtgagagaa gcctgtgccc tgatccaagt ttactcaacc ctctcaggtg accaaaatcc
3001 ccttctcatc actcccctca aagaggtgac tgggccctgc ctctgtttga caaacctcta
3061 acccaggtct tgacaccagc tgttctgtcc cttggagctg taaaccagag agctgctggg
3121 ggattctggc ctagtccctt ccacaccccc accccttgct ctcaacccag gagcatccac
3181 ctccttctct gtctcatgtg tgctcttctt ctttctacag tattatgtac tctactgata
3241 tctaaatatt gatttctgcc ttccttgcta atgcaccatt agaagatatt agtcttgggg
3301 caggatgatt ttggcctcat tactttacca cccccacacc tggaaagcat atactatatt
3361 acaaaatgac attttgccaa aattattaat ataagaagct ttcagtatta gtgatgtcat
3421 ctgtcactat aggtcataca atccattctt aaagtacttg ttatttgttt ttattattac
3481 tgtttgtctt ctccccaggg ttcagtccct caaggggcca tcctgtccca ccatgcagtg
3541 ccccctagct tagagcctcc ctcaattccc cctggccacc accccccact ctgtgcctga
3601 ccttgaggag tcttgtgtgc attgctgtga attagctcac ttggtgatat gtcctatatt
3661 ggctaaattg aaacctggaa ttgtggggca atctattaat agctgcctta aagtcagtaa
3721 cttaccctta gggaggctgg gggaaaaggt tagattttgt attcaggggt tttttgtgta
3781 ctttttgggt ttttaaaaaa ttgtttttgg aggggtttat gctcaatcca tgttctattt
3841 cagtgccaat aaaatttagg tgacttcaaa aaaaaaaaa
(SEQ ID NO:164)
      1 mpktisvrvt tmdaelefai qpnttgkqlf dqvvktiglr evwffglqyq dtkgfstwlk
    61 lnkkvtaqdv rkespllfkf rakfypedvs eeliqditqr lfflqvkegi lnddiycppe
  121 tavllasyav qskygdfnke vhksgylagd kllpqrvleq hklnkdqwee riqvwheehr
  181 gmlredavle ylkiaqdlem ygvnyfsikn kkgselwlgv dalglniyeq ndrltpkigf
  241 pwseirnisf ndkkfvikpi dkkapdfvfy aprlrinkri lalcmgnhel ymrrrkpdti
  301 evqqmkaqar eekhqkqmer amlenekkkr emaekekeki erekeelmer lkqieeqtkk
  361 aqqeleeqtr raleleqerk raqseaekla kerqeaeeak eallqasrdq kktqeqlale
  421 maeltarisq lemarqkkes eavewqqkaq mvqedlektr aelktamstp hvaepaeneq
  481 deqdengaea sadiradama kdrseeertt eaeknervqk hlkaltsela nardeskkta
  541 ndmihaenmr lgrdkyktlr qirqgntkqr idefesm
```

[0540] Putative function
[0541] Cytoskeletal binding protein linking to plama membrane, involved in cytokinesis and cell shape

### Example 11

### Category 3

[0542] Line ID—226

[0543] Phenotype—Lethal phase pharate adult. High mitotic index, rod-like overcondensed chromosomes, lagging chromosomes and bridges in anaphase, highly condensed

[0544] Annotated Drosophila genome genomic segment containing P element insertion site (and map position)—AE003423 (2F1-2)

[0545] P element insertion site—226,527

[0546] Annotated Drosophila genome Complete Genome candidate

[0547] CG2865—EG:25E8.4

(SEQ ID NO:165)

AGAAAACCACATAAACAAGCCAGCAAACAAGGCACACACTTGCTTGAAAA
ACGCACAATGACCTTGCCCACAAACACACACGCATCTGCAAACGACGGCG
GCAGCGGCAACAACAACCACAGCAATATCAGCAGTAACAACAGCAGCAGC
AGCGACGAAGACTCAGACATGTTTGGACCACCCCGCTGCTCCCCGCCCAT
CGGCTATCACCATCACCGTTCCCGTGTGCCCATGATCTCGCCAAAGCTGC
GGCAGCGCGAGGAGCGCAAGCGGATCCTCCAGCTCTGCGCCCACAAGATG
GAGAGGATCAAGGACTCGGAGGCGAACCTGCGGCGCAGCGTCTGCATCAA
CAACACCTACTGCCGCCTGAATGACGAACTGCGGCGCGAGAAGCAGATGC
GCTACCTCCAGAATCTGCCCAGAACCAGCGACAGCGGCGCAAGCACCGAA
CTGGCGCGTGAGAATCTCTTCCAGCCGAACATGGACGACGCCAAGCCGGC
CGGCAATAGCACTAGCAATAATATCAACGCCAACGGCAAGCCTTCATCCT
CTTTTGGCGATGCCTTTGGCTCCTCAAACGGATCATCGTCGGGTCGCGGC
GGAATTTGCTCCCTGGAGAATCAACCGCCCGAGCGTCAGCAGTTGGGGAC
GCCCGCTGGTGCCTCCGCTCCCGAGGCGGCCAATTCGGCGCCCCTTTCCG
TTTCGGGCTCGGCATCGGAACGCGTGAATAACCGAAAACGCCACCTGTCC
AGCTGCAACTTGGTCAACGATCTGGAAATACTGGACAGGGAGCTGAGCGC
CATCAATGCACCCATGCTGCTAATCGATCCAGAGATTACCCAAGGAGCCG
AACAGCTGGAGAAGGCCGCCTTGTCCGCCAGCAGGAAGAGATTGAGGAGC
AATAGCGGCAGCGAGGACGAAAGTGATCGCCTGGTGCGCGAGGCTCTGTC
CCAGTTCTACATACCGCCACAGCGCCTCATCTCCGCCATTGAGGAGTGTC
CCCTGGATGTGGTTGGCTTGGGTATGGGAATGAATGTGAATGTGAATGTG
GGAGGAATTAGTGGAATCGGTGGCATCGGAGGAGCTGCAGGCGCTGGCGT
CGAAATGCCCGGAGGCAAACGGATGAAGCTGAATGACCATCACCATCTCA
ATCACCATCACCATTTGCACCATCATCTGGAGCTGGTCGATTTCGACATG
AACCAAAACCAAAAGGATTTCGAGGTGATCATGGACGCCTTGAGGCTGGG
AACGGCGACACCGCCGAGCGGCGCCAGCAGCGATTCTTGCGGACAGGCGG
CGATGATGAGCGAGTCGGCCAGCGTGTTCCACAATCTGGTGGTCACCTCG
TTGGAGACATGA

(SEQ ID NO:166)

MTLPTNTHASANDGGSGNNNHSNISSNNSSSSDEDSDMFGPPRCSPPIGY
HHHRSRVPMISPKLRQREERKRILQLCAHKMERIKDSEANLRRSVCINNT
YCRLNDELRREKQMRYLQNLPRTSDSGASTELARENLFQPNMDDAKPAGN
STSNNINANGKPSSSFGDAFGSSNGSSSGRGGICSLENQPPERQQLGTPA
GASAPEAANSAPLSVSGSASERVNNRKRHLSSCNLVNDLEILDRELSAIN
APMLLIDPEITQGAEQLEKAALSASRKRLRSNSGSEDESDRLVREALSQF
YLPPQRLISAIEECPLDVVGLGMGMNVNVNVGGISGIGGIGGAAGAGVEM
PGGKRMKLNDHHHLNHHHHLHHHLELVDFDMNQNQKDFEVIMDALRLGTA
TPPSGASSDSCGQAAMMSESASVFHNLVVTSLET

[0548] Human homologue of Complete Genome candidate
[0549] CG2865—none

[0550] Putative function
[0551] Putative phosphatidylinositol 3-kinase

### Example 12

### Category 3

[0552] Line ID—269

[0553] Phenotype—Lethal phase pupal—pharate adult. High mitotic index, colchicines-type overcondensation, high frequency of polyploids

[0554] Annotated Drosophila genome genomic segment containing P element insertion site (and map position)—AE003568 (19F)

[0555] P element insertion site—197,805

[0556] Annotated Drosophila genome Complete Genome candidate

[0557] CG1696—novel protein

(SEQ ID NO:167)

AAAACTCATCGATGCTGCGAAAGTGCGATAGTATCGAATAAACATGAGTG
TGTGCATGAGTGTGGGAATTTATTAAACAAAAACGAAACGCGGACAAACT
ATATTTATGTAATAAACACTAAGCCGCAGCGCCAACGAGTAATGAACAGT
CCACGGCCAGGTCGTACTATTCAGGCGAACGCACCTCGCAATCGACTGCA
ATCAAAGTGCAATAGCTCAATCAATTGATTCGTTTTGCTCAACCAAAAAC
AAAATCTATTCCCAAATCGGTGCGATAGTTGCCAAAATATAAAAACTACA
CTACGCTAAAAAAAAAACAATACACTCACACACTGGCGTACAAGACAACA
AAAGAGAAGAAGAAGAGCAGACGCCAGATATAAAAAGCCCCCAAAAGAAT
TGGAAATAAGACCATACCCCTCCTTCTCCCTTGAAAAGGGACCTTAAAAC
TAGGCGACACCGAATAATTGAACTCAAGTAAAAAACCGGGAAAAGAGAAA
AACACTTTCAACAAAATATCTAGAAGCCTTGTTATCGATTTTGTTCCGGG
TTTTTTTTGTGTGAGTGTGTGTTGTGTGAAGCGCGCCCGCGGGTGTGTGG
GTGAGTGTGCGTGTGGCTCTCGGCGCGTTATCAAAAACAACAACAATTCG
TTGCAAAAGAAAAAATAAAGTAGAGGAGGCGGAAGAAGAAGAGGAATCTG
CTCGCACCGCGGTCAATCGCGGATCGTGGTCGATTTATCGAATTAATCGC
CCCGAACAAAAAAAACACCGTACAAGGACTTGCACTATTTCCAATGATTT
CGCTGCTGCAAATGAAATTCCGTGCGCTTTTGTTGTTGCTATCAAAAGTA
TGGACATGCATTTGTTTCATGTTCAATCGCCAAGTGCGAGCTTTTATCCA
GTATCAACCGGTTAAATACGAACTCTTCCCGTTGTCACCCGTCTCGCGGC
ACCGCCTGAGCCTGGTGCAGCGCAAGACCCTCGTTCTGGACCTGGACGAA
ACGCTAATCCACTCCCATCACAATGCGATGCCCCGGAATACGGTGAAGCC
GGGCACGCCGCACGATTTCACTGTCAAAGTGACCATCGATCGGAATCCAG
TGCGCTTTTTCGTGCACAAGCGACCGCATGTGGACTACTTCCTGGACGTG
GTCTCGCAGTGGTACGATCTGGTGGTCTTCACGGCCAGCATGGAGATTTA
CGGAGCGGCGGTGGCAGACAAGCTGGACAACGGACGAAACATCCTCCGGA
GGCGATACTACAGACAGCACTGCACGCCCGACTACGGATCCTACACCAAA
GACCTGTCGGCCATCTGCAGTGACCTAAATAGGATATTTATCATCGACAA
TTCGCCCGGCGCCTATCGCTGTTTTCCCAACAACGCCATACCCATCAAGA
GTTGGTTCTCGGACCCGATGGACACGGCGCTGCTGTCGCTGCTGCCCATG
CTGGATGCGCTGAGGTTCACGAACGACGTGAGATCGGTGCTGTCGAGGAA
CTTGCACCTGCACCGCCTCTGGTAGCAGGTGGGCCGCCTGTCGCTAGTTT
AGTTTA

(SEQ ID NO:168)

MISLLQMKFRALLLLLSKVWTCICFMFNRQVRAFIQYQPVKYELFPLSPV
SRHRLSLVQRKTLVLDLDETLIHSHHNAMPRNTVKPGTPHDFTVKVTIDR
NPVRFFVHKRPHVDYFLDVVSQWYDLVVFTASMEIYGAAVADKLDNGRNI
LRRRYYRQHCTPDYGSYTKDLSAICSDLNRIFIIDNSPGAYRCFPNAIP
IKSWFSDPMDTALLSLLPMLDALRFTNDVRSVLSRNLHLHRLW

[0558] Human homologue of Complete Genome candidate

[0559] NP_{—}056158 hypothetical protein

| | | |
|---|---|---|
| 1 | gccggggccg gcggtgccgg ggtcatcggg atgatgcgga cgcagtgtct gctggggctg | (SEQ ID NO:169) |
| 61 | cgcgcgttcg tggccttcgc cgccaagctc tggagcttct tcatttacct tttgcggagg | |
| 121 | cagatccgca cggtaattca gtaccaaact gttcgatatg atatcctccc cttatctcct | |
| 181 | gtgtcccgga atcggctagc ccaggtgaag aggaagatcc tggtgctgga tctggatgag | |
| 241 | acacttattc actcccacca tgatggggtc ctgaggccca cagtccggcc tggtacgcct | |
| 301 | cctgacttca tcctcaaggt ggtaatagac aaacatcctg tccggttttt tgtacataag | |
| 361 | aggccccatg tggatttctt cctggaagtg gtgagccagt ggtacgagct ggtggtgttt | |
| 421 | acagcaagca tggagatcta tggctctgct gtggcagata aactggacaa tagcagaagc | |
| 481 | attcttaaga ggagatatta cagacagcac tgcactttgg agttgggcag ctacatcaag | |
| 541 | gacctctctg tggtccacag tgacctctcc agcattgtga tcctggataa ctccccaggg | |
| 601 | gcttacagga gccatccaga caatgccatc cccatcaaat cctggttcag tgaccccagc | |
| 661 | gacacagccc ttctcaacct gctcccaatg ctggatgccc tcaggttcac cgctgatgtt | |
| 721 | cgttccgtgc tgagccgaaa ccttcaccaa catcggctct ggtgacagct gctccccctc | |
| 781 | cacctgagtt ggggtggggg ggaaagggag ggcgagccct tgggatgccg tctgatgccc | |
| 841 | tgtccaatgt gaggactgcc tgggcagggt ctgcccctcc cacccctctc tgccctggga | |
| 901 | gccctacact ccacttggag tctggatgga cacatgggcc aggggctctg aagcagcctc | |
| 961 | actcttaact tcgtgttcac actccatgga aaccccagac tgggacacag gcggaagcct | |
| 1021 | aggagagccg aatcagtgtt tgtgaagagg caggactggc cagagtgaca gacatacggt | |
| 1081 | gatccaggag gctcaaagag aagccaagtc agctttgttg tgatttgatt ttttttaaaa | |
| 1141 | aactcttgta caaaactgat ctaattcttc actcctgctc caagggctgg gctgtgggtg | |
| 1201 | ggatactggg attttgggcc actggatttt ccctaaattt gtcccccctt tactctccct | |
| 1261 | ctatttttct ctccttagac tccctcagac ctgtaaccag ctttgtgtct tttttccttt | |
| 1321 | tctctctttt aaaccatgca ttataacttt gaaacc | |
| 1 | mmrtqcllgl rafvafaakl wsffiyllrr qirtviqyqt vrydilplsp vsrnrlaqvk | (SEQ ID NO:170) |
| 61 | rkilvldlde tlihshhdgv lrptvrpgtp pdfilkvvid khpvrffvhk rphvdfflev | |
| 121 | vsqwyelvvf tasmeiygsa vadkldnsrs ilkrryyrqh ctlelgsyik dlsvvhsdls | |
| 181 | sivildnspg ayrshpdnai pikswfsdps dtallnllpm ldalrftadv rsvlsrnlhq | |
| 241 | hrlw | |

[0560] Putative function
[0561] unknown

### Example 13

### Category 3

[0562] Line ID—291

[0563] Phenotype—Lethal phase pupal—pharate adult. High mitotic index, colchicines-type overcondensed chromosomes, many strongly stained nuclei

[0564] Annotated Drosophila genome genomic segment containing P element insertion site (and map position)—AE003427 (3D5)

[0565] P element insertion site—131,166

[0566] Annotated Drosophila genome Complete Genome candidate

[0567] CG10798—dm diminutive, dMyc1

(SEQ ID NO:171)

GTCGCGTGTTCAGTTCACCGCGGGTAATTCAGAGAATCGCTTTGTGGATT
GGATTTTTGCCTGTTTTCCGCCCGATACAAAAAAAAAAAACCAAACGCTA
TATAAATAGTTCTGTAGTAAAACCTGAAGCAACACGTTTTAAAATATACA
ACTACTACTAACAACTGTCACAGCCAAGTTACAAAAGTGCTAAATCCCAG
AAATAACCTAAGAGCCGACTTAAAACCGCGCAAATACATAAAAAAAAATC
TTCTCCAAAGCAGAAACAAAAACTTGTGAAAAACTAGAATTAAAAAAAGA
TTTTTTAAAAAAAATCAGCTAGTGCAAAATAAACGGGAAGAATTTTTTTT
TGTGTCCCTTTTTTTGGTGTTTTTTCTCCGTCTTTCCCCTTCTTTGACGC
AAAAAAAAAAGTGCCCAACTTGCTGGCGGCACGGGAACGGGATAGAAATA
GATATAGCCGAAAGCGACTGGAAAGCAAAGGAAGCTAACTAAATTGGATT
ACAATCAATTAAATAGAGACGGATACGGAAACTATGTTCAGCGAGACAGG
CATATAACTCAGGAACTTAAGATATATAGAAAGAAAAAAAAACCCAGACA
ACATAATCGCAATGGCCCTTTACCGCTCTGATCCGTATTCCATAATGGAC
GACCAACTTTTTTCAAATATTTCAATATTCGATATGGATAATGATCTGTA
CGATATGGACAAACTCCTTTCGTCGTCCACCATTCAGAGTGATCTCGAGA
AGATCGAGGACATGGAAAGTGTATTTCAAGACTATGACTTAGAGGAGGAT
ATGAAGCCAGAGATCCGCAACATCGACTGCATGTGGCCGGCGATGTCCAG
CTGTTTGACCAGCGGTAACGGTAATGGAATAGAGAGCGGAAACAGTGCAG
CCTCGTCGTACAGCGAAACCGGTGCCGTATCCCTGGCGATGGTTTCCGGC
TCTACGAATCTCTACAGCGCGTATCAACGATCGCAGACGACAGATAACAC
CCAGTCAAATCAACAGCATGTCGTCAACAGTGCCGAGAACATGCCGGTGA
TCATCAAGAAGGAGCTCGCAGATCTGGACTACACGGTCTGTCAGAAGCGC
CTCCGTTTGAGCGGCGGTGACAAGAAGTCACAGATCCAGGACGAGGTCCA
TTTAATACCGCCCGGCGGAAGTTTGCTCCGCAAGCGGAACAACCAGGACA
TTATCCGCAAATCGGGCGAATTGAGCGGCAGCGATAGCATAAAATACCAG
AGACCAGACACACCTCACAGTCTTACCGACGAGGTGGCCGCCTCAGAGTT
TAGACATAACGTCGACTTGCGTGCCTGCGTGATGGGCAGCAATAATATCT
CGCTGACCGGCAATGATAGCGATGTCAACTACATTAAGCAAATCAGCAGG
GAGCTTCAGAATACCGGCAAGGATCCGTTGCCGGTGCGTTACATCCCGCC
GATCAACGATGTCCTCGATGTGCTCAACCAGCATTCCAATTCGACGGGTG
GCCAACAGCAGTTGAACCAACAGCAACTGGACGAGCAACAACAGGCCATC
GATATAGCCACTGGACGCAACACAGTGGATTCTCCGCCGACGACCGGCTC
TGATAGTGACTCCGATGACGGTGAACCCCTCAACTTTGACCTGCGCCATC
ATCGCACTAGCAAAAGCGGCAGCAATGCCAGCATCACCACCAACAACAAC
AACAGCAACAACAAAAACAACAAATTGAAGAACAACAGCAACGGCATGCT
GCACATGATGCACATCACCGATCACAGCTACACGCGCTGCAACGATATGG
TGGACGATGGTCCCAATTTGGAGACCCCCTCAGATTCCGATGAGGAAATC
GATGTCGTTTCATATACGGACAAGAAGCTACCCACAAATCCCTCGTGCCA
CTTGATGGGCGCCCTACAGTTCCAGATGGCCCATAAGATCTCGATTGATC
ACATGAAGCAAAAACCGCGCTACAATAACTTCAATCTGCCGTACACACCG
GCCAGCAGCAGTCCAGTGAAATCGGTGGCCAACTCGCGTTATCCATCACC
GTCGAGCACACCGTATCAGAACTGCTCCTCCGCTTCGCCGTCCTACTCGC
CGCTATCCGTGGACTCTTCAAATGTCAGCTCGAGCAGCTCCAGTTCCAGT
TCGCAGTCAAGCTTCACCACCTCCAGTTCGAACAAGGGACGCAAACGATC
CAGTCTGAAGGATCCAGGCTTGTTGATCTCCTCCAGCAGCGTTTATCTGC
CGGGAGTCAATAACAAAGTGACGCATAGCTCCATGATGAGCAAAAAGAGT
CGTGGCAAGAAGGTGGTTGGCACCTCGTCTGGCAATACATCTCCGATATC
GTCTGGCCAGGATGTGGATGCCATGGATCGTAATTGGCAGCGGCGCAGTG
GTGGAATTGCCACTAGCACAAGCTCCAACAGCAGTGTCCATCGGAAGGAC
TTTGTTTTGGGCTTTGATGAGGCCGATACGATCGAGAAGCGCAATCAGCA
CAATGATATGGAGCGTCAGCGACGCATTGGACTCAAGAACCTCTTTGAGG
CTCTAAAGAAACAGATTCCCACAATTAGGGACAAGGAGCGGGCTCCCAAG
GTAAATATCCTGCGAGAGGCGGCCAAGCTATGCATCCAGCTGACCCAGGA
GGAGAAGGAGCTTAGTATGCAGCGCCAGCTTTTGTCGCTGCAGCTGAAGC
AACGTCAGGACACTCTGGCCAGTTACCAAATGGAGTTGAACGAATCGCGC
TCGGTTAGTGGATAGTGTTGTCTCATACTATCGGCTTAAAGCGGCGGCGT
AGGGCTAGGATAACCCCCAATGTATATGCAAGATTTGTATATCCTCCTAC
TTTTTTTTTTTTGCAATTTACTTTGATTTAGCTTCGATCCTTTCTTGACA
TTAAGCCCTAAATATGATTTTTTTCTGGAGAACTTCAATATCAGTTAGTA
GGTTATGTTTAACGATTTGCTTGCGCTTTTTCCGCTTTTTTTTTTGTTTT
TTTACCATACCATACCATAC

(SEQ ID NO:172)

MDDQLFSNISIFDMDNDLYDMDKLLSSSTIQSDLEKIEDMESVFQDYDLE
EDMKPEIRNIDCMWPAMSSCLTSGNGNGIESGNSAASSYSETGAVSLAMV
SGSTNLYSAYQRSQTTDNTQSNQQHVVNSAENMPVIIKKELADLDYTVCQ
KRLRLSGGDKKSQIQDEVHLIPPGGSLLRKRNNQDIIRKSGELSGSDSIK
YQRPDTPHSLTDEVAASEFRHNVDLRACVMGSNNISLTGNDSDVNYIKQI
SRELQNTGKDPLPVRYIPPINDVLDVLNQHSNSTGGQQQLNQQQLDEQQQ
AIDIATGRNTVDSPPTTGSDSDSDDGEPLNFDLRHHRTSKSGSNASITTN
NNNSNNKNNKLKNNSNGMLHMMHITDHSYTRCNDMVDDGPNLETPSDSDE
EIDVVSYTDKKLPTNPSCHLMGALQFQMAHKISIDHMKQKPRYNNFNLPY
TPASSSPVKSVANSRYPSPSSTPYQNCSSASPSYSPLSVDSSNVSSSSSS
SSSQSSFTTSSSNKGRKRSSLKDPGLLISSSSVYLPGVNNKVTHSSMMSK
KSRGKKVVGTSSGNTSPISSGQDVDAMDRNWQRRSGGIATSTSSNSSVHR
KDFVLGFDEADTIEKRNQHNDMERQRRIGLKNLFEALKKQIPTIRDKERA
PKVNILREAAKLCIQLTQEEKELSMQRQLLSLQLKQRQDTLASYQMELNE
SRSVSG

[0568] Human homologue of Complete Genome candidate

[0569] CAA23831 c-myc oncogene

| | | |
|---|---|---|
| 1 | ctgctcgcgg ccgccaccgc cgggccccgg ccgtccctgg ctcccctcct gcctcgagaa | (SEQ ID NO:173) |
| 61 | gggcagggct tctcagaggc ttggcgggaa aaaagaacgg agggagggat cgcgctgagt | |
| 121 | ataaaagccg gttttcgggg ctttatctaa ctcgctgtag taattccagc gagaggcaga | |
| 181 | gggagcgagc gggcggccgg ctagggtgga agagccgggc gagcagagct gcgctgcggg | |
| 241 | cgtcctggga agggagatcc ggagcgaata gggggcttcg cctctggccc agccctcccg | |
| 301 | cttgatcccc caggccagcg gtccgcaacc cttgccgcat ccacgaaact ttgcccatag | |
| 361 | cagcgggcgg gcactttgca ctggaactta caacacccga gcaaggacgc gactctcccg | |
| 421 | acgcggggag gctattctgc ccatttgggg acacttcccc gccgctgcca ggacccgctt | |
| 481 | ctctgaaagg ctctccttgc agctgcttag acgctggatt tttttcgggt agtggaaaac | |
| 541 | cagcagcctc ccgcgacgat gcccctcaac gttagcttca ccaacaggaa ctatgacctc | |
| 601 | gactacgact cggtgcagcc gtatttctac tgcgacgagg aggagaactt ctaccagcag | |
| 661 | cagcagcaga gcgagctgca gcccccggcg cccagcgagg atatctggaa gaaattcgag | |
| 721 | ctgctgccca ccccgcccct gtcccctagc cgccgctccg ggctctgctc gccctcctac | |
| 781 | gttgcggtca cacccttctc ccttcgggga gacaacgacg gcggtggcgg gagcttctcc | |
| 841 | acggccgacc agctggagat ggtgaccgag ctgctgggag gagacatggt gaaccagagt | |
| 901 | ttcatctgcg acccggacga cgagaccttc atcaaaaaca tcatcatcca ggactgtatg | |
| 961 | tggagcggct tctcggccgc cgccaagctc gtctcagaga agctggcctc ctaccaggct | |
| 1021 | gcgcgcaaag acagcggcag cccgaacccc gcccgcggcc acagcgtctg ctccacctcc | |
| 1081 | agcttgtacc tgcaggatct gagcgccgcc gcctcagagt gcatcgaccc ctcggtggtc | |
| 1141 | ttcccctacc ctctcaacga cagcagctcg cccaagtcct gcgcctcgca agactccagc | |
| 1201 | gccttctctc cgtcctcgga ttctctgctc tcctcgacgg agtcctcccc gcagggcagc | |
| 1261 | cccgagcccc tggtgctcca tgaggagaca ccgcccacca ccagcagcga ctctgaggag | |
| 1321 | gaacaagaag atgaggaaga aatcgatgtt gtttctgtgg aaaagaggca ggctcctggc | |
| 1381 | aaaaggtcag agtctggatc accttctgct ggaggccaca gcaaacctcc tcacagccca | |
| 1441 | ctggtcctca agaggtgcca cgtctccaca catcagcaca actacgcagc gcctccctcc | |
| 1501 | actcggaagg actatcctgc tgccaagagg gtcaagttgg acagtgtcag agtcctgaga | |
| 1561 | cagatcagca acaaccgaaa atgcaccagc cccaggtcct cggacaccga ggagaatgtc | |
| 1621 | aagaggcgaa cacacaacgt cttggagcgc cagaggagga acgagctaaa acggagcttt | |
| 1681 | tttgccctgc gtgaccagat cccggagttg gaaaacaatg aaaaggcccc caaggtagtt | |
| 1741 | atccttaaaa aagccacagc atacatcctg tccgtccaag cagaggagca aaagctcatt | |
| 1801 | tctgaagagg acttgttgcg gaaacgacga gaacagttga aacacaaact tgaacagcta | |
| 1861 | cggaactctt gtgcgtaagg aaaagtaagg aaaacgattc cttctaacag aaatgtcctg | |
| 1921 | agcaatcacc tatgaacttg tttcaaatgc atgatcaaat gcaacctcac aaccttggct | |
| 1981 | gagtcttgag actgaaagat ttagccataa tgtaaactgc ctcaaattgg actttgggca | |
| 2041 | taaaagaact tttttatgct taccatcttt tttttttctt taacagattt gtatttaaga | |
| 2101 | attgttttta aaaaatttta a | |
| 1 | mplnvsftnr nydldydsvq pyfycdeeen fyqqqqqsel qppapsediw kkfellptpp | (SEQ ID NO:174) |
| 61 | lspsrrsglc spsyvavtpf slrgdndggg gsfstadqle mvtellggdm vnqsficdpd | |
| 121 | detfikniii qdcmwsgfsa aaklvsekla syqaarkdsg spnparghsv cstsslylqd | |
| 181 | lsaaasecid psvvfpypln dssspkscas qdssafspss dsllsstess pqgspeplvl | |
| 241 | heetppttss dseeeqedee eidvvsvekr qapgkrsesg spsagghskp phsplvlkrc | |
| 301 | hvsthqhnya appstrkdyp aakrvkldsv rvlrqisnnr kctsprssdt eenvkrrthn | |
| 361 | vlerqrrnel krsffalrdq ipelenneka pkvvilkkat ayilsvqaee qkliseedll | |
| 421 | rkrreqlkhk leqlrnsca | |

[0570] Putative function
[0571] C-myc oncogene, transcription factor

### Example 14

### Category 3

[0572] Line ID—316

[0573] Phenotype—Lethal phase larval stage 3
[0574] Pre-pupal-pupal. Small optic lobes, missing or small imaginal discs, badly defined chromosomes.

[0575] Annotated Drosophila genome genomic segment containing P element insertion site (and map position)—AE003506 (16B-C)

[0576] P element insertion site—27,868

[0577] Annotated Drosophila genome Complete Genome candidate

[0578] CG8465—novel protein (3 splice variants)

(SEQ ID NO:175)

TGACAGTCCGCCTCTAATTTAATTTCGTTTGTGCACATTTTGTTTGAAAG
ACGCTTAAGATTATTGGGTTTTGTTTCATGTATTGTGCCCTTTGTGCTAA
AAGTGCATCCGCCATTTTACGCAGAGATGTCGACCTATTTCGGGGTCTAT
ATCCCGACCTCCAAAGCGGGCTGTTTTGAGGGATCGGTGTCGCAGTGCAT
CGGCTCCATAGCCGCGGTGAACATAAAGCCATCCAATCCGGCGTCTGGAT
CGGCATCAGTAGCATCGGGATCGCCATCCGGCTCGGCGGCATCCGTGCAA
ACGGGCAACGCAGACGATGGCAGTGCTGCCACCAAGTACGAGGATCCCGA
CTATCCACCGGACTCGCCACTGTGGCTGATCTTCACGGAGAAATCCAAGG
CGCTGGACATCCTGCGACACTACAAGGAGGCGCGCCTCCGCGAGTTTCCC
AATCTGGAGCAGGCGGAGAGTTACGTTCAGTTTGGGTTCGAGAGCATCGA
GGCGCTCAAGAGATTTTGCAAGGCAAAGCCCGAAAGCAAGCCCATTCCGA
TAATCAGCGGTAGCGGTTACAAGAGCTCACCGACCTCGACGGACAATTCG
TGCTCCTCCTCGCCGACGGGTAACGGCAGTGGCTTCATCATTCCCCTGGG
AAGCAATTCCTCAATGTCGAATTTACTGCTCAGTGACTCACCGACTTCCT
CGCCGAGCAGCTCCAGCAACGTCATTGCCAATGGGCGACAGCAGCAGATG
CAGCAGCAACAGCAGCAGCAGCCGCAGCAGCCGGATGTGTCCGGAGAAGG
CCCTCCTTTCCGGGCGCCCACCAAACAGGAACTGGTAGAGTTTCGCAAGC
AAATCGAAGGTGGTCACATAGACCGGGTGAAGAGGATTATATGGGAGAAT
CCACGATTTTTGATCAGCAGCGGTGATACGCCCACCAGTTTGAAGGAGGG
CTGTCGCTATAATGCCATGCACATCTGCGCCCAGGTCAATAAGGCCAGGA
TCGCTCAGTTGCTGTTAAAGACCATTTCGGATCGGGAGTTCACTCAGCTT
TACGTTGGCAAGAAGGGCAGTGGCAAGATGTGTGCTGCCCTCAACATCAG
TCTCCTGGACTATTACCTGAACATGCCGGACAAGGGGCGCGGCGAAACAC
CGCTCCACTTTGCCGCAAAGAACGGTCATGTGGCCATGGTCGAGGTTCTC
GTTTCCTATCCGGAGTGCAAATCGCTGCGGAATCATGAGGGCAAGGAGCC
CAAGGAAATCATCTGCCTGCGTAATGCTAATGCTACACATGTGACCATCA
AGAAGCTGGAGCTGCTCTTGTACGATCCGCATTTTGTGCCCGTACTAAGA
TCCCAGTCAAATACACTGCCGCCAAAAGTGGGTCAACCGTTCTCGCCCAA
AGATCCACCGAACCTGCAACACAAAGCGGACGATTACGAGGGCCTCAGCG
TGGACCTGGCAATCAGTGCGCTGGCGGGACCCATGTCCCGCGAAAAGGCC
ATGAACTTCTATCGCCGTTGGAAGACACCACCGCGGGTCAGCAACAATGT
GATGTCGCCGCTGGCTGGTTCACCATTTAGCTCGCCGGTGAAAGTAACCC
CAAGCAAGTCGATCTTTGACCGAAGTGCTGGAAACTCGAGTCCAGTCCAC
TCAGGACGCAGAGTGCTCTTTAGTCCATTGGCGGAGGCGACCAGCTCACC
AAAACCGACGAAAAACGTGCCCAATGGCACCAATGAGTGCGAGCACAACA
ATAATAATGTGAAGCCAGTGTATCCGTTGGAGTTCCCGGCGACACCCATT
CGAAAAATGAAACCGGATTTATTCATGGCCTATCGCAATAACAATAGCTT
TGATTCGCCATCTTTGGCCGATGACTCCCAAATCCTGGACATGAGCCTAA
GCCGCAGCCTGAATGCGTCGCTAAATGACAGCTTCCGTGAGCGGCACATC
AAGAACACTGATATCGAGAAGGGTCTGGAGGTGGTCGGCCGCCAACTGGC
ACGACAGGAGCAGTTAGAGTGGCGCGAGTACTGGGATTTTCTCGATTCAT
TTTTGGACATTGGTACGACCGAAGGCCTGGCCCGTCTTGAAGCGTATTTC
CTGGAAAAGACCGAACAGCAGGCGGATAAATCAGAAACGGTCTGGAACTT
TGCCCATCTGCATCAGTATTTCGATTCGATGGCCGGCGAGCAACAGCAGC
AACTCCGAAAGGATAAAAATGAGGCTGCGGGAGCAACTTCGCCATCCGCC
GGAGTCATGACTCCGTACACATGCGTAGAGAAGTCGCTGCAAGTGTTCGC
CAAGCGCATCACTAAAACGTTGATCAACAAAATCGGCAACATGGTGTCCA
TCAACGACACGCTGCTCTGTGAGCTCAAAAGACTGAAATCGCTGATTGTC
AGCTTCAAGGATGATGCCCGCTTCATTAGCGTGGACTTTAGCAAGGTGCA
TTCACGTATCGCCCACCTGGTGGCCAGCTATGTGACCCACTCGCAGGAGG
TCAGCGTAGCCATGCGTCTACAATTGTTGCAGATGCTCCGAAGTTTGCGG
CAACTGCTGGCCGACGAGCGTGGTCGAGAACAGCATTTGGGCTGCGTGTG
CGCTAGTCTATTGCTGATGCTGGAACAGGCGCCGACATCCGCCGTGCATC
TACCAGACACTCTGAAGACCGAGGAGCTATGTTGCGCCGCCTGGGAGACG
GAGCAGTGTTGCGCCTGTCTGTGGGACGCAAATCTCAGCCGTAAGACCAG
TCGTCGAAAGCGCACTAAGTCGCTGCGGGCAGCTGCTGTTGTTCAGTCTC
AGGGTCAGCTTCAGGATACTTCGGGATCGACAGGGTCGTCCGCCTTGCAC
GCTTCGCTTGGTGTGGGATCGACCAGTTTGGGAGCATCGAGGGTCGTGGC
GTCCGCTTCGAAAGATGCTTGGCGCCGTCAACAAAGCGACGACGAGGACT
ACGACAGCGATGAGCAAGTAATCTTTTTCGACTGCACTAATGTTACGCTG
CCTTATGGAAGCAGCAGCGAGGACGAGGAAAACTTCCGTACGCCGCCGCA
AAGCTTGTCGCCAGGTATTTCCATGGATTTGGAGCCGCGTTACGAGTTGT
TTATTTTTGGAAACGAGCCAACCAAGCGAGATTTGGATGTGCTGAATGCC
CTTTCCAATGTCGACATTGATAAGGAAACACTGCCGCATGTCTACGCCTG
GAAGACTGCCATGGAGAGCTACTCCTGTGCTGAAATGAATCTGAACGTCA
AGGTTCAAAAGCCGGAGCCTTGGTATTCTGGAACCAGTTCTAGCCACAAC
AGCCAACCATTGTTGCATCCCAAGCGTCTGCTTGCCACGCCAAAGCTGAA
TGCCGTGGTCAGCGGCAGACGCGGATCCGGACCATTGACGGCGCCAGTTA
CACCGCGTCTGGCGCGAACTCCGTCCGCCGCCAGTATTCAAGTTGCATCC
GAGACGAATGGCGAGTCGGTCGGAACTGCTGTGACTCCGGCATCGCCGAT
TTTGAGTTTTGCCGCCTTGACGGCAGCGACGCAGTCATTCCAAACACCAT
TGAACAAGGTGCGCGGCTTGTTCAGCCAATATCGGGATCAACGGTCCTAT
AACGAGGGGGACACGCCGCTGGGCAATCGGAACTGAAACGGAATCGGCCC
GGAAACAGAAACAGAAACAGCGACTGATTGATGAAAGGCCGACTGCATAC
TTACCCCCCTGAATAGCCGGTGTCGTCCATTGTCCCTTTTAATGTTAATC
GCATGTATATTA

(SEQ ID NO:176)

MSTYFGVYIPTSKAGCFEGSVSQCIGSIAAVNIKPSNPASGSASVASGSP
SGSAASVQTGNADDGSAATKYEDPDYPPDSPLWLIFTEKSKALDILRHYK
EARLREFPNLEQAESYVQFGFESIEALKRFCKAKPESKPIPIISGSGYKS
SPTSTDNSCSSSPTGNGSGFIIPLGSNSSMSNLLLSDSPTSSPSSSSNVI
ANGRQQQMQQQQQQQPQQPDVSGEGPPFRAPTKQELVEFRKQIEGGHIDR
VKRIIWENPRFLISSGDTPTSLKEGCRYNAMHICAQVNKARIAQLLLKTI
SDREFTQLYVGKKGSGKMCAALNISLLDYYLNMPDKGRGETPLHFAAKNG
HVAMVEVLVSYPECKSLRNHEGKEPKEIICLRNANATHVTIKKLELLLYD
PHFVPVLRSQSNTLPPKVGQPFSPKDPPNLQHKADDYEGLSVDLAISALA
GPMSREKAMNFYRRWKTPPRVSNNVMSPLAGSPFSSPVKVTPSKSIFDRS
AGNSSPVHSGRRVLFSPLAEATSSPKPTKNVPNGTNECEHNNNNVKPVYP
LEFPATPIRKMKPDLFMAYRNNNSFDSPSLADDSQILDMSLSRSLNASLN
DSFRERHIKNTDIEKGLEVVGRQLARQEQLEWREYWDFLDSFLDIGTTEG
LARLEAYFLEKTEQQADKSETVWNFAHLHQYFDSMAGEQQQQLRKDKNEA
AGATSPSAGVMTPYTCVEKSLQVFAKRITKTLINKIGNMVSINDTLLCEL
KRLKSLIVSFKDDARFISVDFSKVHSRIAHLVASYVTHSQEVSVAMRLQL
LQMLRSLRQLLADERGREQHLGCVCASLLLMLEQAPTSAVHLPDTLKTEE
LCCAAWETEQCCACLWDANLSRKTSRRKRTKSLRAAAVVQSQGQLQDTSG
STGSSALHASLGVGSTSLGASRVVASASKDAWRRQQSDDEDYDSDEQVIF
FDCTNVTLPYGSSSEDEENFRTPPQSLSPGISMDLEPRYELFIFGNEPTK
RDLDVLNALSNVDIDKETLPHVYAWKTAMESYSCAEMNLNVKVQKPEPWY
SGTSSSHNSQPLLHPKRLLATPKLNAVVSGRRGSGPLTAPVTPRLARTPS
AASIQVASETNGESVGTAVTPASPILSFAALTAATQSFQTPLNKVRGLFS
QYRDQRSYNEGDTPLGNRN

(SEQ ID NO:177)

TTGATGTTACCCTATTTTTACCGTTGCCTTCGCTTGCCATCAGCGGAACT
TTACATTTTTTCACGGAGTTGTGAAGAAGTTGCCTGTTATTTGGTGTTGA
TGTCAAACCATTTTAACCGCTTACCTTGCAGTGCATCCGCCATTTTACGC
AGAGATGTCGACCTATTTCGGGGTCTATATCCCGACCTCCAAAGCGGGCT
GTTTTGAGGGATCGGTGTCGCAGTGCATCGGCTCCATAGCCGCGGTGAAC
ATAAAGCCATCCAATCCGGCGTCTGGATCGGCATCAGTAGCATCGGGATC
GCCATCCGGCTCGGCGGCATCCGTGCAAACGGGCAACGCAGACGATGGCA
GTGCTGCCACCAAGTACGAGGATCCCGACTATCCACCGGACTCGCCACTG
TGGCTGATCTTCACGGAGAAATCCAAGGCGCTGGACATCCTGCGACACTA
CAAGGAGGCGCGCCTCCGCGAGTTTCCCAATCTGGAGCAGGCGGAGAGTT
ACGTTCAGTTTGGGTTCGAGAGCATCGAGGCGCTCAAGAGATTTTGCAAG
GCAAAGCCCGAAAGCAAGCCCATTCCGATAATCAGCGGTAGCGGTTACAA
GAGCTCACCGACCTCGACGGACAATTCGTGCTCCTCCTCGCCGACGGGTA
ACGGCAGTGGCTTCATCATTCCCCTGGGAAGCAATTCCTCAATGTCGAAT
TTACTGCTCAGTGACTCACCGACTTCCTCGCCGAGCAGCTCCAGCAACGT
CATTGCCAATGGGCGACAGCAGCAGATGCAGCAGCAACAGCAGCAGCAGC
CGCAGCAGCCGGATGTGTCCGGAGAAGGCCCTCCTTTCCGGGCGCCCACC
AAACAGGAACTGGTAGAGTTTCGCAAGCAAATCGAAGGTGGTCACATAGA
CCGGGTGAAGAGGATTATATGGGAGAATCCACGATTTTTGATCAGCAGCG
GTGATACGCCCACCAGTTTGAAGGAGGGCTGTCGCTATAATGCCATGCAC
ATCTGCGCCCAGGTCAATAAGGCCAGGATCGCTCAGTTGCTGTTAAAGAC
CATTTCGGATCGGGAGTTCACTCAGCTTTACGTTGGCAAGAAGGGCAGTG
GCAAGATGTGTGCTGCCCTCAACATCAGTCTCCTGGACTATTACCTGAAC
ATGCCGGACAAGGGGCGCGGCGAAACACCGCTCCACTTTGCCGCAAAGAA
CGGTCATGTGGCCATGGTCGAGGTTCTCGTTTCCTATCCGGAGTGCAAAT
CGCTGCGGAATCATGAGGGCAAGGAGCCCAAGGAAATCATCTGCCTGCGT
AATGCTAATGCTACACATGTGACCATCAAGAAGCTGGAGCTGCTCTTGTA
CGATCCGCATTTTGTGCCCGTACTAAGATCCCAGTCAAATACACTGCCGC
CAAAAGTGGGTCAACCGTTCTCGCCCAAAGATCCACCGAACCTGCAACAC
AAAGCGGACGATTACGAGGGCCTCAGCGTGGACCTGGCAATCAGTGCGCT
GGCGGGACCCATGTCCCGCGAAAAGGCCATGAACTTCTATCGCCGTTGGA
AGACACCACCGCGGGTCAGCAACAATGTGATGTCGCCGCTGGCTGGTTCA
CCATTTAGCTCGCCGGTGAAAGTAACCCCAAGCAAGTCGATCTTTGACCG
AAGTGCTGGAAACTCGAGTCCAGTCCACTCAGGACGCAGAGTGCTCTTTA
GTCCATTGGCGGAGGCGACCAGCTCACCAAAACCGACGAAAAACGTGCCC
AATGGCACCAATGAGTGCGAGCACAACAATAATAATGTGAAGCCAGTGTA
TCCGTTGGAGTTCCCGGCGACACCCATTCGAAAAATGAAACCGGATTTAT
TCATGGCCTATCGCAATAACAATAGCTTTGATTCGCCATCTTTGGCCGAT
GACTCCCAAATCCTGGACATGAGCCTAAGCCGCAGCCTGAATGCGTCGCT
AAATGACAGCTTCCGTGAGCGGCACATCAAGAACACTGATATCGAGAAGG
GTCTGGAGGTGGTCGGCCGCCAACTGGCACGACAGGAGCAGTTAGAGTGG
CGCGAGTACTGGGATTTTCTCGATTCATTTTTGGACATTGGTACGACCGA
AGGCCTGGCCCGTCTTGAAGCGTATTTCCTGGAAAAGACCGAACAGCAGG
CGGATAAATCAGAAACGGTCTGGAACTTTGCCCATCTGCATCAGTATTTC
GATTCGATGGCCGGCGAGCAACAGCAGCAACTCCGAAAGGATAAAAATGA
GGCTGCGGGAGCAACTTCGCCATCCGCCGGAGTCATGACTCCGTACACAT
GCGTAGAGAAGTCGCTGCAAGTGTTCGCCAAGCGCATCACTAAAACGTTG
ATCAACAAAATCGGCAACATGGTGTCCATCAACGACACGCTGCTCTGTGA
GCTCAAAAGACTGAAATCGCTGATTGTCAGCTTCAAGGATGATGCCCGCT
TCATTAGCGTGGACTTTAGCAAGGTGCATTCACGTATCGCCCACCTGGTG
GCCAGCTATGTGACCCACTCGCAGGAGGTCAGCGTAGCCATGCGTCTACA
ATTGTTGCAGATGCTCCGAAGTTTGCGGCAACTGCTGGCCGACGAGCGTG
GTCGAGAACAGCATTTGGGCTGCGTGTGCGCTAGTCTATTGCTGATGCTG
GAACAGGCGCCGACATCCGCCGTGCATCTACCAGACACTCTGAAGACCGA
GGAGCTATGTTGCGCCGCCTGGGAGACGGAGCAGTGTTGCGCCTGTCTGT
GGGACGCAAATCTCAGCCGTAAGACCAGTCGTCGAAAGCGCACTAAGTCG
CTGCGGGCAGCTGCTGTTGTTCAGTCTCAGGGTCAGCTTCAGGATACTTC
GGGATCGACAGGGTCGTCCGCCTTGCACGCTTCGCTTGGTGTGGGATCGA
CCAGTTTGGGAGCATCGAGGGTCGTGGCGTCCGCTTCGAAAGATGCTTGG
CGCCGTCAACAAAGCGACGACGAGGACTACGACAGCGATGAGCAAGTAAT
CTTTTTCGACTGCACTAATGTTACGCTGCCTTATGGAAGCAGCAGCGAGG
ACGAGGAAAACTTCCGTACGCCGCCGCAAAGCTTGTCGCCAGGTATTTCC
ATGGATTTGGAGCCGCGTTACGAGTTGTTTATTTTTGGAAACGAGCCAAC
CAAGCGAGATTTGGATGTGCTGAATGCCCTTTCCAATGTCGACATTGATA
AGGAAACACTGCCGCATGTCTACGCCTGGAAGACTGCCATGGAGAGCTAC
TCCTGTGCTGAAATGAATCTGAACGTCAAGGTTCAAAAGCCGGAGCCTTG
GTATTCTGGAACCAGTTCTAGCCACAACAGCCAACCATTGTTGCATCCCA
AGCGTCTGCTTGCCACGCCAAAGCTGAATGCCGTGGTCAGCGGCAGACGC
GGATCCGGACCATTGACGGCGCCAGTTACACCGCGTCTGGCGCGAACTCC
GTCCGCCGCCAGTATTCAAGTTGCATCCGAGACGAATGGCGAGTCGGTCG
GAACTGCTGTGACTCCGGCATCGCCGATTTTGAGTTTTGCCGCCTTGACG
GCAGCGACGCAGTCATTCCAAACACCATTGAACAAGGTGCGCGGCTTGTT
CAGCCAATATCGGGATCAACGGTCCTATAACGAGGGGGACACGCCGCTGG
GCAATCGGAACTGAAACGGAATCGGCCCGGAAACAGAAACAGAAACAGCG
ACTGATTGATGAAAGGCCGACTGCATACTTACCCCCCTGAATAGCCGGTG
TCGTCCATTGTCCCTTTTAATGTTAATCGCATGTATATTA

(SEQ ID NO:178)

MSTYFGVYIPTSKAGCFEGSVSQCIGSIAAVNIKPSNPASGSASVASGSP
SGSAASVQTGNADDGSAATKYEDPDYPPDSPLWLIFTEKSKALDILRHYK
EARLREFPNLEQAESYVQFGFESIEALKRFCKAKPESKPIPIISGSGYKS
SPTSTDNSCSSSPTGNGSGFIIPLGSNSSMSNLLLSDSPTSSPSSSSNVI
ANGRQQQMQQQQQQQPQQPDVSGEGPPFRAPTKQELVEFRKQIEGGHIDR
VKRIIWENPRFLISSGDTPTSLKEGCRYNAMHICAQVNKARIAQLLLKTI
SDREFTQLYVGKKGSGKMCAALNISLLDYYLNMPDKGRGETPLHFAAKNG
HVAMVEVLVSYPECKSLRNHEGKEPKEIICLRNANATHVTIKKLELLLYD
PHFVPVLRSQSNTLPPKVGQPFSPKDPPNLQHKADDYEGLSVDLAISALA
GPMSREKAMNFYRRWKTPPRVSNNVMSPLAGSPFSSPVKVTPSKSIFDRS
AGNSSPVHSGRRVLFSPLAEATSSPKPTKNVPNGTNECEHNNNNVKPVYP
LEFPATPIRKMKPDLFMAYRNNNSFDSPSLADDSQILDMSLSRSLNASLN
DSFRERHIKNTDIEKGLEVVGRQLARQEQLEWREYWDFLDSFLDIGTTEG
LARLEAYFLEKTEQQADKSETVWNFAHLHQYFDSMAGEQQQQLRKDKNEA
AGATSPSAGVMTPYTCVEKSLQVFAKRITKTLINKIGNMVSINDTLLCEL
KRLKSLIVSFKDDARFISVDFSKVHSRIAHLVASYVTHSQEVSVAMRLQL
LQMLRSLRQLLADERGREQHLGCVCASLLLMLEQAPTSAVHLPDTLKTEE
LCCAAWETEQCCACLWDANLSRKTSRRKRTKSLRAAAVVQSQGQLQDTSG
STGSSALHASLGVGSTSLGASRVVASASKDAWRRQQSDDEDYDSDEQVIF
FDCTNVTLPYGSSSEDEENFRTPPQSLSPGISMDLEPRYELFIFGNEPTK
RDLDVLNALSNVDIDKETLPHVYAWKTAMESYSCAEMNLNVKVQKPEPWY
SGTSSSHNSQPLLHPKRLLATPKLNAVVSGRRGSGPLTAPVTPRLARTPS
AASIQVASETNGESVGTAVTPASPILSFAALTAATQSFQTPLNKVRGLFS
QYRDQRSYNEGDTPLGNRN

(SEQ ID NO:179)

AAAACAGCCAGCTCATTTATTAATGGTTTATCCCTCTCGATGCCCACACA
TCAACATTGCCATCGCCACGACGGAGCAGCGGACTCGCCACTGTGGCTGA
TCTTCACGGAGAAATCCAAGGCGCTGGACATCCTGCGACACTACAAGGAG
GCGCGCCTCCGCGAGTTTCCCAATCTGGAGCAGGCGGAGAGTTACGTTCA
GTTTGGGTTCGAGAGCATCGAGGCGCTCAAGAGATTTTGCAAGGCAAAGC
CCGAAAGCAAGCCCATTCCGATAATCAGCGGTAGCGGTTACAAGAGCTCA
CCGACCTCGACGGACAATTCGTGCTCCTCCTCGCCGACGGGTAACGGCAG
TGGCTTCATCATTCCCCTGGGAAGCAATTCCTCAATGTCGAATTTACTGC
TCAGTGACTCACCGACTTCCTCGCCGAGCAGCTCCAGCAACGTCATTGCC
AATGGGCGACAGCAGCAGATGCAGCAGCAACAGCAGCAGCAGCCGCAGCA
GCCGGATGTGTCCGGAGAAGGCCCTCCTTTCCGGGCGCCCACCAAACAGG
AACTGGTAGAGTTTCGCAAGCAAATCGAAGGTGGTCACATAGACCGGGTG
AAGAGGATTATATGGGAGAATCCACGATTTTTGATCAGCAGCGGTGATAC
GCCCACCAGTTTGAAGGAGGGCTGTCGCTATAATGCCATGCACATCTGCG
CCCAGGTCAATAAGGCCAGGATCGCTCAGTTGCTGTTAAAGACCATTTCG
GATCGGGAGTTCACTCAGCTTTACGTTGGCAAGAAGGGCAGTGGCAAGAT
GTGTGCTGCCCTCAACATCAGTCTCCTGGACTATTACCTGAACATGCCGG
ACAAGGGGCGCGGCGAAACACCGCTCCACTTTGCCGCAAAGAACGGTCAT
GTGGCCATGGTCGAGGTTCTCGTTTCCTATCCGGAGTGCAAATCGCTGCG
GAATCATGAGGGCAAGGAGCCCAAGGAAATCATCTGCCTGCGTAATGCTA
ATGCTACACATGTGACCATCAAGAAGCTGGAGCTGCTCTTGTACGATCCG
CATTTTGTGCCCGTACTAAGATCCCAGTCAAATACACTGCCGCCAAAAGT
GGGTCAACCGTTCTCGCCCAAAGATCCACCGAACCTGCAACACAAAGCGG
ACGATTACGAGGGCCTCAGCGTGGACCTGGCAATCAGTGCGCTGGCGGGA
CCCATGTCCCGCGAAAAGGCCATGAACTTCTATCGCCGTTGGAAGACACC
ACCGCGGGTCAGCAACAATGTGATGTCGCCGCTGGCTGGTTCACCATTTA
GCTCGCCGGTGAAAGTAACCCCAAGCAAGTCGATCTTTGACCGAAGTGCT
GGAAACTCGAGTCCAGTCCACTCAGGACGCAGAGTGCTCTTTAGTCCATT
GGCGGAGGCGACCAGCTCACCAAAACCGACGAAAAACGTGCCCAATGGCA
CCAATGAGTGCGAGCACAACAATAATAATGTGAAGCCAGTGTATCCGTTG
GAGTTCCCGGCGACACCCATTCGAAAAATGAAACCGGATTTATTCATGGC
CTATCGCAATAACAATAGCTTTGATTCGCCATCTTTGGCCGATGACTCCC
AAATCCTGGACATGAGCCTAAGCCGCAGCCTGAATGCGTCGCTAAATGAC
AGCTTCCGTGAGCGGCACATCAAGAACACTGATATCGAGAAGGGTCTGGA
GGTGGTCGGCCGCCAACTGGCACGACAGGAGCAGTTAGAGTGGCGCGAGT
ACTGGGATTTTCTCGATTCATTTTTGGACATTGGTACGACCGAAGGCCTG
GCCCGTCTTGAAGCGTATTTCCTGGAAAAGACCGAACAGCAGGCGGATAA
ATCAGAAACGGTCTGGAACTTTGCCCATCTGCATCAGTATTTCGATTCGA
TGGCCGGCGAGCAACAGCAGCAACTCCGAAAGGATAAAAATGAGGCTGCG
GGAGCAACTTCGCCATCCGCCGGAGTCATGACTCCGTACACATGCGTAGA
GAAGTCGCTGCAAGTGTTCGCCAAGCGCATCACTAAAACGTTGATCAACA
AAATCGGCAACATGGTGTCCATCAACGACACGCTGCTCTGTGAGCTCAAA
AGACTGAAATCGCTGATTGTCAGCTTCAAGGATGATGCCCGCTTCATTAG
CGTGGACTTTAGCAAGGTGCATTCACGTATCGCCCACCTGGTGGCCAGCT
ATGTGACCCACTCGCAGGAGGTCAGCGTAGCCATGCGTCTACAATTGTTG
CAGATGCTCCGAAGTTTGCGGCAACTGCTGGCCGACGAGCGTGGTCGAGA
ACAGCATTTGGGCTGCGTGTGCGCTAGTCTATTGCTGATGCTGGAACAGG
CGCCGACATCCGCCGTGCATCTACCAGACACTCTGAAGACCGAGGAGCTA
TGTTGCGCCGCCTGGGAGACGGAGCAGTGTTGCGCCTGTCTGTGGGACGC
AAATCTCAGCCGTAAGACCAGTCGTCGAAAGCGCACTAAGTCGCTGCGGG
CAGCTGCTGTTGTTCAGTCTCAGGGTCAGCTTCAGGATACTTCGGGATCG
ACAGGGTCGTCCGCCTTGCACGCTTCGCTTGGTGTGGGATCGACCAGTTT
GGGAGCATCGAGGGTCGTGGCGTCCGCTTCGAAAGATGCTTGGCGCCGTC
AACAAAGCGACGACGAGGACTACGACAGCGATGAGCAAGTAATCTTTTTC
GACTGCACTAATGTTACGCTGCCTTATGGAAGCAGCAGCGAGGACGAGGA
AAACTTCCGTACGCCGCCGCAAAGCTTGTCGCCAGGTATTTCCATGGATT
TGGAGCCGCGTTACGAGTTGTTTATTTTTGGAAACGAGCCAACCAAGCGA
GATTTGGATGTGCTGAATGCCCTTTCCAATGTCGACATTGATAAGGAAAC
ACTGCCGCATGTCTACGCCTGGAAGACTGCCATGGAGAGCTACTCCTGTG
CTGAAATGAATCTGAACGTCAAGGTTCAAAAGCCGGAGCCTTGGTATTCT
GGAACCAGTTCTAGCCACAACAGCCAACCATTGTTGCATCCCAAGCGTCT
GCTTGCCACGCCAAAGCTGAATGCCGTGGTCAGCGGCAGACGCGGATCCG
GACCATTGACGGCGCCAGTTACACCGCGTCTGGCGCGAACTCCGTCCGCC
GCCAGTATTCAAGTTGCATCCGAGACGAATGGCGAGTCGGTCGGAACTGC
TGTGACTCCGGCATCGCCGATTTTGAGTTTTGCCGCCTTGACGGCAGCGA
CGCAGTCATTCCAAACACCATTGAACAAGGTGCGCGGCTTGTTCAGCCAA
TATCGGGATCAACGGTCCTATAACGAGGGGGACACGCCGCTGGGCAATCG
GAACTGAAACGGAATCGGCCCGGAAACAGAAACAGAAACAGCGACTGATT
GATGAAAGGCCGACTGCATACTTACCCCCCTGAATAGCCGGTGTCGTCCA
TTGTCCCTTTTAATGTTAATCGCATGTATATTA

(SEQ ID NO:180)

MPTHQHCHRHDGAADSPLWLIFTEKSKALDILRHYKEARLREFPNLEQAE
SYVQFGFESIEALKRFCKAKPESKPIPIISGSGYKSSPTSTDNSCSSSPT
GNGSGFIIPLGSNSSMSNLLLSDSPTSSPSSSSNVIANGRQQQMQQQQQQ
QPQQPDVSGEGPPFRAPTKQELVEFRKQIEGGHIDRVKRIIWENPRFLIS
SGDTPTSLKEGCRYNAMHICAQVNKARIAQLLLKTISDREFTQLYVGKKG
SGKMCAALNISLLDYYLNMPDKGRGETPLHFAAKNGHVAMVEVLVSYPEC
KSLRNHEGKEPKEIICLRNANATHVTIKKLELLLYDPHFVPVLRSQSNTL
PPKVGQPFSPKDPPNLQHKADDYEGLSVDLAISALAGPMSREKAMNFYRR
WKTPPRVSNNVMSPLAGSPFSSPVKVTPSKSIFDRSAGNSSPVHSGRRVL
FSPLAEATSSPKPTKNVPNGTNECEHNNNNVKPVYPLEFPATPIRKMKPD
LFMAYRNNNSFDSPSLADDSQILDMSLSRSLNASLNDSFRERHIKNTDIE
KGLEVVGRQLARQEQLEWREYWDFLDSFLDIGTTEGLARLEAYFLEKTEQ
QADKSETVWNFAHLHQYFDSMAGEQQQQLRKDKNEAAGATSPSAGVMTPY
TCVEKSLQVFAKRITKTLINKIGNMVSINDTLLCELKRLKSLIVSFKDDA
RFISVDFSKVHSRIAHLVASYVTHSQEVSVAMRLQLLQMLRSLRQLLADE
RGREQHLGCVCASLLLMLEQAPTSAVHLPDTLKTEELCCAAWETEQCCAC
LWDANLSRKTSRRKRTKSLRAAAVVQSQGQLQDTSGSTGSSALHASLGVG
STSLGASRVVASASKDAWRRQQSDDEDYDSDEQVIFFDCTNVTLPYGSSS
EDEENFRTPPQSLSPGISMDLEPRYELFIFGNEPTKRDLDVLNALSNVDI
DKETLPHVYAWKTAMESYSCAEMNLNVKVQKPEPWYSGTSSSHNSQPLLH
PKRLLATPKLNAVVSGRRGSGPLTAPVTPRLARTPSAASIQVASETNGES
VGTAVTPASPILSFAALTAATQSFQTPLNKVRGLFSQYRDQRSYNEGDTP
LGNRN

[0579] Human homologue of Complete Genome candidate

[0580] BAA31667 KIAA0692 protein

| | | |
|---|---|---|
| 1 | gagattttgg ttacagtgtg ggcctgaatc ctccagagga ggaagctgtg acatccaaga | (SEQ ID NO:181) |
| 61 | cctgctcggt gccccctagt gacaccgaca cctacagagc tggagcgact gcgtctaagg | |
| 121 | agccgcccct gtactatggg gtgtgtccag tgtatgagga cgtcccagcg agaaatgaaa | |
| 181 | ggatctatgt ttatgaaaat aaaaaggaag cattgcaagc tgtcaagatg atcaaagggt | |
| 241 | cccgatttaa agctttttct accagagaag acgctgagaa atttgctaga ggaatttgtg | |
| 301 | attatttccc ttctccaagc aaaacgtcct taccactgtc tcctgtgaaa acagctccac | |
| 361 | tctttagcaa tgacaggttg aaagatggtt tgtgcttgtc ggaatcagaa acagtcaaca | |
| 421 | aagagcgagc gaacagttac aaaaatcccc gcacgcagga cctcaccgcc aagcttcgga | |
| 481 | aagctgtgga gaagggagag gaggacacct tttctgacct tatctggagc aacccccggt | |
| 541 | atctgatagg ctcaggagac aaccccacta tcgtgcagga agggtgcagg tacaacgtga | |
| 601 | tgcatgttgc tgccaaagag aaccaggctt ccatctgcca gctgactctg gacgtcctgg | |
| 661 | agaaccctga cttcatgagg ctgatgtacc ctgatgacga cgaggccatg ctgcagaagc | |
| 721 | gtatccgtta cgtggtggac ctgtacctca acacccccga caagatgggc tatgacacac | |
| 781 | cgttgcattt tgcttgtaag tttggaaatg cagatgtagt caacgtgctt tcgtcacacc | |
| 841 | atttgattgt aaaaaactca aggaataaat atgataaaac acctgaagat gtaatttgtg | |
| 901 | aaagaagcaa aaataaatct gtggaactga aggagcggat cagagagtat ttaaagggcc | |
| 961 | actactacgt gcccctcctg agagcggaag agacttcttc tccagtcatc ggggagctgt | |
| 1021 | ggtccccaga ccagacggct gaggcctctc acgtcagccg ctatggaggc agccccagag | |
| 1081 | acccggtact gaccctgaga gccttcgcag ggcccctgag tccagccaag gcagaagatt | |
| 1141 | ttcgcaagct ctggaaaact ccacctcgag agaaagcagg cttccttcac cacgtcaaga | |
| 1201 | agtcggaccc ggaaagaggc tttgagagag tgggaaggga gctagctcat gagctggggt | |
| 1261 | atccctgggt tgaatactgg gaatttctgg gctgttttgt tgatctgtct tcccaggaag | |
| 1321 | gcctgcaaag actagaagaa tatctcacac agcaggaaat aggcaaaaag gctcaacaag | |
| 1381 | aaacaggaga acgggaagcc tcctgccgag ataaagccac cacgtctggc agcaattcca | |
| 1441 | tttccgtgag ggcgtttcta gatgaagatg acatgagctt ggaagaaata aaaaatcggc | |
| 1501 | aaaatgcagc tcgaaataac agcccgccca cagtcggtgc ttttggacat acgaggtgca | |
| 1561 | gcgccttccc cttggagcag gaggcagacc tcatagaagc cgccgagccg ggaggtccac | |
| 1621 | acagcagcag aaatgggctc tgccatcctc tgaatcacag caggaccctg gcgggcaaga | |
| 1681 | gaccaaaggc cccccatggg gaggaagccc atctgccacc tgtctcggat ttgactgttg | |
| 1741 | agtttgataa actgaatttg caaaatatag gacgtagcgt ttccaagaca ccagatgaaa | |
| 1801 | gtacaaaaac taaagatcag atcctgactt caagaatcaa tgcagtagaa agagacttgt | |
| 1861 | tagagccttc tcccgcagac caactcggga atggccacag gaggacagaa agtgaaatgt | |
| 1921 | cagccaggat cgctaaaatg tccttgagtc ccagcagccc caggcacgag gatcagctcg | |
| 1981 | aggtcaccag ggaaccggcc aggcggctct tcctttttgg agaggagcca tcaaaactcg | |
| 2041 | atcaggatgt tttggccgct cttgaatgtg cagacgtcga cccccatcag ttcccggccg | |
| 2101 | tgcacagatg gaagagtgct gtcctgtgct actcaccctc ggacagacag agttggccca | |
| 2161 | gtcccgcggt gaaaggaagg ttcaagtctc agctgccaga tctcagtggc cctcacagct | |
| 2221 | acagtccggg gagaaacagc gtggctggaa gcaaccccgc aaagccaggc ctgggcagtc | |
| 2281 | ctgggcgcta cagccccgtg cacgggagcc agctccgcag gatggcgcgc ctggctgagc | |
| 2341 | ttgccgccct gtaggcttgg cgctgggctc tcggtttgtt cttcattttt aaagaaggaa | |
| 2401 | gggtcatatg tttattgcta aactgtcaaa aaggaatata ttctgattaa attattactc | |
| 2461 | ctcactttga gggtgtgaga attttagaag atttaaatgt tctatataac acttagattt | |
| 2521 | ctgatatttt ggaagaagtt agaagttaat gaaagcaaac tcagttacca attttctgga | |
| 2581 | aaatatccat gtggtaatgt agacttttta ggtggcaatt tctaggtctg aaatatagca | |
| 2641 | gaggaaaggg cgctgaggca gttgcaggca ggcagccctg tacttaccct gtactcacct | |
| 2701 | catccgacag acgctgtgga tgaggagggg cttggcggag gcgtgagcac cgatgtccct | |
| 2761 | ttgataacct gcactcacca agatgaacta tttgccgccc tgtcttttcc tgggttgggg | |
| 2821 | ggtggcatct gatggtggca gagtgcctgt tggttcgccc gtgggtctca tggttcagac | |
| 2881 | agagggaggt ggacggcagg gatcagggag coaggagcgc gcctcagact tgcagcaacc | |
| 2941 | attgtgattt gggttgttcg gaatatttaa attactgatc agaagatgaa agtagctttt | |
| 3001 | ctcttgggaa gtcttgcagc ccgtgggagt gataccagga gcaacacaga gctcagcagc | |
| 3061 | ggcgccaagg tgttccctgt ttcctcagca cgtgagcctt caccgcctgc ttcattcagg | |
| 3121 | agccagtgca gcagtaatac agtctataca ttgttctgtt ttcaaattta tcctgaggct | |
| 3181 | ttgttgagca taaatgatta tacgataaag gtatccgtta ttttggaact catttcagtt | |
| 3241 | gggatctcct gtatgcagag tgttgcattt agaggtttga gtcccatctt ggtttcttgc | |
| 3301 | cgtgctgact gtagccttca ccttgacttg aatgaaggtc tgtggttgga atgtgtgagg | |
| 3361 | agccgctgag gtgttcagga ggtgctgcct ggaggtcggt ttcttcctgg gtgttacggg | |
| 3421 | caactgctca cacagttgtt tctctgtgaa catttccagt gtttaatcca aaatgaaaac | |
| 3481 | ccaccaatgc ttttgctaac ttcagtgcct tttataaatc atttttaaat ttcctgaact | |
| 3541 | tgctttttga ggatatacag ggatattaag tagacgcagg attgtttttg tttgtaaaaa | |
| 3601 | ttctgaattg aaactttgtt ttaaaaaaag gcttctttct ttcatatgac aagagatagg | |
| 3661 | tcaggaatat tggaatcaag atttaaatgt taaaattcga ttttgttaca cagggtgtgt | |
| 3721 | tcatttgttt tgtagcagac aagatctaga tcccagacag aaacaacaca tgctattcta | |
| 3781 | aaaagccgca ttttaaaagg caccttggtt ctcaaaagaa atcagaatat ggatattcgt | |
| 3841 | agtgatgatc tgttttctct aaaatcttac catattgtct gtatatggtt gtaaattcaa | |
| 3901 | atggaaagta aaacgttttg gccctgattt tgtatgtgga ccactgctcc tgatttccca | |
| 3961 | ggtcttaggc cacctttgac tgtttctccg tttgtttgtg ggcagcgatt ccagtcccaa | |
| 4021 | cggaggcatt ctcgtgtgtc ccggggggtt atgtccttca caaaacactt aatgaaatga | |
| 4081 | attacttc | |
| 1 | dfgysvglnp peeeavtskt csvppsdtdt yragataske pplyygvcpv yedvparner | (SEQ ID NO:182) |
| 61 | iyvyenkkea lqavkmikgs rfkafstred aekfargicd yfpspsktsl plspvktapl | |
| 121 | fsndrlkdgl clsesetvnk eransyknpr tqdltaklrk avekgeedtf sdliwsnpry | |
| 181 | ligsgdnpti vqegcrynvm hvaakenqas icqltldvle npdfmrlmyp dddeamlqkr | |
| 241 | iryvvdlyln tpdkmgydtp lhfackfgna dvvnvlsshh livknsrnky dktpedvice | |
| 301 | rsknksvelk erireylkgh yyvpllraee tsspvigelw spdqtaeash vsryggsprd | |
| 361 | pvltlrafag plspakaedf rklwktppre kagflhhvkk sdpergferv grelahelgy | |
| 421 | pwveyweflg cfvdlssqeg lqrleeyltq qeigkkaqqe tgereascrd kattsgsnsi | |
| 481 | svrafldedd msleeiknrq naarnnsppt vgafghtrcs afpleqeadl ieaaepggph | |
| 541 | ssrnglchpl nhsrtlagkr pkaphgeeah lppvsdltve fdklnlqnig rsvsktpdes | |
| 601 | tktkdqilts rinaverdll epspadqlgn ghrrtesems ariakmslsp ssprhedqle | |
| 661 | vtreparrlf lfgeepskld qdvlaaleca dvdphqfpav hrwksavlcy spsdrqswps | |
| 721 | pavkgrfksq lpdlsgphsy spgrnsvags npakpglgsp gryspvhgsq lrrmarlael | |
| 781 | aal | |

[0581] Putative function
[0582] Unknown

### Example 15

### Category 3

[0583] Line ID—379

[0584] Category—Lethal phase pharate adult, Dot and rod-like overcondensed chromosomes, high mitotic index, overcondensed anaphases some with lagging chromosomes, a few tetraploid cells with overcondensed chromosomes, XYY males.

[0585] Annotated Drosophila genome genomic segment containing P element insertion site (and map position)—AE003443 (7D14-E2)

[0586] P element insertion site—130,532

[0587] Annotated Drosophila genome Complete Genome candidate
[0588] 2 candidates:

[0589] CG10964—novel, similarity to dehydrogenases

(SEQ ID NO:183)

AACGAAACAGCCGGCCGTCAAAATTTTTCCTAACATTTCACTATTTTCAC
GCTTGTGTTACGGCAATAAAGTCGATTGATAAGCACGGAAAGATCTGGCT
GCGGGTCTGGTGAAATCCACAGAACACACGGAACCCGTATAGTAGTGCCG
CCCTTTATTGGTTTTATCTCAAGTACGACGCGATAAGATTTCGAGCAACT
CGATCGCGGATCTTCGGAAAAAAAAAACATGAACTCCATCCTGATAACCG
GCTGCAATCGAGGATTGGGTCTGGGCCTGGTCAAGGCGCTGCTCAATCTT
CCCCAGCCGCCGCAGCATCTATTTACCACCTGCCGGAATCGCGAGCAGGC
AAAGGAGCTGGAGGATCTAGCCAAGAACCACTCGAACATACACATACTTG
AGATTGATTTGAGAAATTTCGATGCCTATGACAAGCTAGTCGCCGACATC
GAGGGCGTGACCAAGGACCAAGGCCTCAATGTGCTCTTCAACAATGCCGG
CATAGCGCCCAAATCGGCCAGGATAACGGCCGTTCGATCGCAGGAGCTGC
TCGACACCTTGCAGACCAACACGGTTGTGCCCATCATGCTGGCCAAGGCG
TGTCTGCCGCTCCTTAAGAAGGCAGCCAAAGCGAACGAATCCCAGCCGAT
GGGCGTGGGCCGTGCCGCCATTATTAACATGTCCTCGATCCTTGGCTCCA
TCCAGGGCAACACGGACGGCGGAATGTACGCCTATCGCACCTCTAAGTCG
GCCTTGAATGCGGCCACCAAGTCGTTGAGCGTGGATCTGTATCCGCAACG
CATCATGTGCGTCAGTCTGCATCCTGGCTGGGTGAAAACCGACATGGGTG
GCTCCAGTGCCCCCTTGGACGTGCCCACCAGCACGGGACAAATTGTGCAG
ACCATCAGCAAGCTGGGCGAGAAACAGAACGGCGGTTTTGTCAACTACGA
CGGCACTCCGCTGGCCTGGTAA

(SEQ ID NO:184)

MNSILITGCNRGLGLGLVKALLNLPQPPQHLFTTCRNREQAKELEDLAKN
HSNIHILEIDLRNFDAYDKLVADIEGVTKDQGLNVLFNNAGIAPKSARIT
AVRSQELLDTLQTNTVVPIMLAKACLPLLKKAAKANESQPMGVGRAAIIN
MSSILGSIQGNTDGGMYAYRTSKSALNAATKSLSVDLYPQRIMCVSLHPG
WVKTDMGGSSAPLDVPTSTGQIVQTISKLGEKQNGGFVNYDGTPLAW

[0590] CG2151—Trxr-1thoredoxin reductase—1(2 splice variants)

(SEQ ID NO:185)

CGACAAGCCAATCGACGTCTCCCTTTCGCACGCTCGTACGAAAGTACAAA
AGCTATTGCAAAAGTTGGCTCCGCTTATTCGTTTCGTGCTTTCGCGAGTG
CCGAGAGCCGCTACAATACACGCTTAGCAGTTTTTACATTTCCGCTTCGA
CTACAACAACATTCACTACCCGCCGTTGATCCTTGTTTTCTGTCTGATTT
ACGTGGAGCACCTACCAACAAGCAACAAAATAATGGCGCCCGTGCAAGGA
TCCTACGACTACGACCTTATTGTGATTGGAGGCGGCTCAGCTGGCCTGGC
CTGCGCCAAGGAGGCAGTCCTCAATGGAGCCCGTGTGGCCTGTCTGGATT
TCGTTAAGCCCACGCCCACTCTGGGCACCAAGTGGGGCGTTGGCGGCACC
TGCGTGAACGTGGGCTGCATTCCCAAGAAGCTGATGCACCAGGCCTCCCT
TCTGGGCGAGGCTGTCCATGAGGCGGCCGCCTACGGCTGGAACGTGGACG
AAAAGATCAAGCCAGACTGGCACAAGCTGGTGCAGTCCGTACAGAACCAC
ATCAAGTCCGTCAACTGGGTGACCCGTGTGGATCTGCGCGACAAGAAAGT
GGAGTACATCAATGGACTGGGCTCCTTCGTGGACTCGCACACACTGCTGG
CCAAGCTGAAGAGCGGCGAGCGCACAATCACCGCCCAGACCTTCGTCATT
GCCGTTGGCGGCCGACCACGTTATCCGGATATTCCCGGTGCTGTCGAGTA
TGGCATCACCAGCGATGATCTGTTCAGTTTGGACCGCGAGCCCGGCAAGA
CCCTGGTGGTGGGAGCTGGCTACATTGGCTTGGAGTGCGCTGGATTCCTG
AAGGGTCTCGGCTACGAGCCCACTGTGATGGTGCGTTCTATTGTGCTGCG
TGGCTTCGACCAGCAGATGGCCGAGCTGGTGGCAGCCTCGATGGAGGAGC
GTGGCATTCCCTTCCTCCGCAAGACGGTGCCGCTGTCCGTGGAAAAGCAG
GATGATGGCAAGCTGCTCGTGAAGTACAAGAACGTGGAGACCGGCGAGGA
GGCCGAGGATGTTTACGACACCGTTCTGTGGGCCATCGGCCGCAAGGGTC
TGGTGGACGATCTGAACCTGCCCAATGCCGGCGTGACTGTGCAGAAGGAC
AAGATTCCAGTGGACTCCCAGGAGGCTACCAATGTGGCAAACATCTACGC
TGTCGGCGATATCATCTATGGCAAGCCAGAGCTGACGCCCGTCGCCGTTT
TGGCTGGCCGTTTGCTGGCCCGCCGCCTGTACGGAGGATCTACCCAGCGC
ATGGACTACAAGGATGTGGCCACCACCGTTTTCACGCCCCTGGAGTACGC
CTGCGTCGGCCTGAGCGAGGAGGATGCCGTCAAGCAGTTCGGAGCCGATG
AGATCGAGGTGTTCCACGGCTACTACAAGCCCACGGAGTTCTTCATTCCC
CAGAAGAGCGTGCGCTACTGCTACTTGAAGGCTGTGGCCGAGCGCCATGG
TGACCAGCGCGTCTATGGACTGCACTATATTGGCCCGGTGGCCGGTGAGG
TTATCCAGGGATTCGCTGCCGCTTTGAAGTCTGGCCTGACTATTAACACG
CTGATCAACACCGTGGGCATCCATCCCACTACCGCCGAAGAATTCACCCG
GCTGGCCATCACCAAGCGCTCCGGACTGGACCCCACGCCGGCCAGCTGCT
GCAGCTAAAGCGGGAACGCAGCTCAGCCGCCTGGGACGTGTCGAAGCCGC
TTGCTCCACCCGAAATCCCGTAGATGAATGGTTGTTGTCGCGGCCCAGCG
ATCGATGAGTTCAATAGTTCCGTTTCGTTTCCACAATTAACACCCAACAC
AATAGCTCTGCGCAAGGGAGGGGCACTGGGCAGCGATGGCGGGTGGAACG
ACACCAGTGGAACTACCCGCGCGACCAGCCCAACCCACGACTGCTGCGCC
GCCGACATGCACTCAAAATTTTGAATTTGTTTGAACCTATGAAATTAACT
ATGAAATCCCCTAAATGTACGGTTGAAGAATATAATTTTTCACC

(SEQ ID NO:186)

MAPVQGSYDYDLIVIGGGSAGLACAKEAVLNGARVACLDFVKPTPTLGTK
WGVGGTCVNVGCIPKKLMHQASLLGEAVHEAAAYGWNVDEKIKPDWHKLV
QSVQNHIKSVNWVTRVDLRDKKVEYINGLGSFVDSHTLLAKLKSGERTIT
AQTFVIAVGGRPRYPDIPGAVEYGITSDDLFSLDREPGKTLVVGAGYIGL
ECAGFLKGLGYEPTVMVRSIVLRGFDQQMAELVAASMEERGIPFLRKTVP
LSVEKQDDGKLLVKYKNVETGEEAEDVYDTVLWAIGRKGLVDDLNLPNAG
VTVQKDKIPVDSQEATNVANIYAVGDIIYGKPELTPVAVLAGRLLARRLY
GGSTQRMDYKDVATTVFTPLEYACVGLSEEDAVKQFGADEIEVFHGYYKP
TEFFIPQKSVRYCYLKAVAERHGDQRVYGLHYIGPVAGEVIQGFAAALKS
GLTINTLINTVGIHPTTAEEFTRLAITKRSGLDPTPASCCS

(SEQ ID NO:187)

CCCGGCCGAACCAGCGAACGTGTTTGTGTTGTGTGTTCCGCCGTCATTTT
TCTGCACCCTTTTCGCGAATAGTTTCGTTTCGCCTCCAGCTGGTAGAGTG
AAACGCCAAACGTTGAAGAAGGGGAAAGGCCAACAAGATGAACTTGTGCA
ATTCGAGATTCTCCGTTACGTTCGTGCGGCAGTGCTCGACGATTTTAACG
TCTCCTTCGGCTGGCATTATACAAAACAGAGGCTCACTGACAACAAAGGT
TCCCCATTGGATTTCCAGTAGTCTCAGCTGTGCCCATCACACGTTTCAGC
GAACTATGAACTTGACGGGACAGCGAGGATCACGCGACAGTACTGGAGCT
ACCGGTGGGAATGCTCCAGCCGGATCCGGTGCCGGCGCACCACCACCCTT
CCAGCATCCACATTGCGACAGGGCGGCCATGTACGCGCAACCGGTGCGAA
AGATGAGCACCAAAGGAGGATCCTACGACTACGACCTTATTGTGATTGGA
GGCGGCTCAGCTGGCCTGGCCTGCGCCAAGGAGGCAGTCCTCAATGGAGC
CCGTGTGGCCTGTCTGGATTTCGTTAAGCCCACGCCCACTCTGGGCACCA
AGTGGGGCGTTGGCGGCACCTGCGTGAACGTGGGCTGCATTCCCAAGAAG
CTGATGCACCAGGCCTCCCTTCTGGGCGAGGCTGTCCATGAGGCGGCCGC
CTACGGCTGGAACGTGGACGAAAAGATCAAGCCAGACTGGCACAAGCTGG
TGCAGTCCGTACAGAACCACATCAAGTCCGTCAACTGGGTGACCCGTGTG
GATCTGCGCGACAAGAAAGTGGAGTACATCAATGGACTGGGCTCCTTCGT
GGACTCGCACACACTGCTGGCCAAGCTGAAGAGCGGCGAGCGCACAATCA
CCGCCCAGACCTTCGTCATTGCCGTTGGCGGCCGACCACGTTATCCGGAT
ATTCCCGGTGCTGTCGAGTATGGCATCACCAGCGATGATCTGTTCAGTTT
GGACCGCGAGCCCGGCAAGACCCTGGTGGTGGGAGCTGGCTACATTGGCT
TGGAGTGCGCTGGATTCCTGAAGGGTCTCGGCTACGAGCCCACTGTGATG
GTGCGTTCTATTGTGCTGCGTGGCTTCGACCAGCAGATGGCCGAGCTGGT
GGCAGCCTCGATGGAGGAGCGTGGCATTCCCTTCCTCCGCAAGACGGTGC
CGCTGTCCGTGGAAAAGCAGGATGATGGCAAGCTGCTCGTGAAGTACAAG
AACGTGGAGACCGGCGAGGAGGCCGAGGATGTTTACGACACCGTTCTGTG
GGCCATCGGCCGCAAGGGTCTGGTGGACGATCTGAACCTGCCCAATGCCG
GCGTGACTGTGCAGAAGGACAAGATTCCAGTGGACTCCCAGGAGGCTACC
AATGTGGCAAACATCTACGCTGTCGGCGATATCATCTATGGCAAGCCAGA
GCTGACGCCCGTCGCCGTTTTGGCTGGCCGTTTGCTGGCCCGCCGCCTGT
ACGGAGGATCTACCCAGCGCATGGACTACAAGGATGTGGCCACCACCGTT
TTCACGCCCCTGGAGTACGCCTGCGTCGGCCTGAGCGAGGAGGATGCCGT
CAAGCAGTTCGGAGCCGATGAGATCGAGGTGTTCCACGGCTACTACAAGC
CCACGGAGTTCTTCATTCCCCAGAAGAGCGTGCGCTACTGCTACTTGAAG
GCTGTGGCCGAGCGCCATGGTGACCAGCGCGTCTATGGACTGCACTATAT
TGGCCCGGTGGCCGGTGAGGTTATCCAGGGATTCGCTGCCGCTTTGAAGT
CTGGCCTGACTATTAACACGCTGATCAACACCGTGGGCATCCATCCCACT
ACCGCCGAAGAATTCACCCGGCTGGCCATCACCAAGCGCTCCGGACTGGA
CCCCACGCCGGCCAGCTGCTGCAGCTAAAGCGGGAACGCAGCTCAGCCGC
CTGGGACGTGTCGAAGCCGCTTGCTCCACCCGAAATCCCGTAGATGAATG
GTTGTTGTCGCGGCCCAGCGATCGATGAGTTCAATAGTTCCGTTTCGTTT
CCACAATTAACACCCAACACAATAGCTCTGCGCAAGGGAGGGGCACTGGG
CAGCGATGGCGGGTGGAACGACACCAGTGGAACTACCCGCGCGACCAGCC
CAACCCACGACTGCTGCGCCGCCGACATGCACTCAAAATTTTGAATTTGT
TTGAACCTATGAAATTAACTATGAAATCCCCTAAATGTACGGTTGAAGAA
TATAATTTTTCACC

(SEQ ID NO:188)

MSTKGGSYDYDLIVIGGGSAGLACAKEAVLNGARVACLDFVKPTPTLGTK
WGVGGTCVNVGCIPKKLMHQASLLGEAVHEAAAYGWNVDEKIKPDWHKLV
QSVQNHIKSVNWVTRVDLRDKKVEYINGLGSFVDSHTLLAKLKSGERTIT
AQTFVIAVGGRPRYPDIPGAVEYGITSDDLFSLDREPGKTLVVGAGYIGL
ECAGFLKGLGYEPTVMVRSIVLRGFDQQMAELVAASMEERGIPFLRKTVP
LSVEKQDDGKLLVKYKNVETGEEAEDVYDTVLWAIGRKGLVDDLNLPNAG
VTVQKDKIPVDSQEATNVANIYAVGDIIYGKPELTPVAVLAGRLLARRLY
GGSTQRMDYKDVATTVFTPLEYACVGLSEEDAVKQFGADEIEVFHGYYKP
TEFFIPQKSVRYCYLKAVAERHGDQRVYGLHYIGPVAGEVIQGFAAALKS
GLTINTLINTVGIHPTTAEEFTRLAITKRSGLDPTPASCCS

[0591] Human homologue of Complete Genome candidate

[0592] (CG10965)—AAC50725 11-cis retinol dehydrogenase

| | | |
|---|---|---|
| 1 | taagcttcgg gcgctgtagt acctgccagc tttcgccaca ggaggctgcc acctgtaggt | (SEQ ID NO:189) |
| 61 | cacttgggct ccagctatgt ggctgcctct tctgctgggt gccttactct gggcagtgct | |
| 121 | gtggttgctc agggaccggc agagcctgcc cgccagcaat gcctttgtct tcatcaccgg | |
| 181 | ctgtgactca ggctttgggc gccttctggc actgcagctg gaccagagag gcttccgagt | |
| 241 | cctggccagc tgcctgaccc cctccggggc cgaggacctg cagcgggtgg cctcctcccg | |
| 301 | cctccacacc accctgttgg atatcactga tccccagagc gtccagcagg cagccaagtg | |
| 361 | ggtggagatg cacgttaagg aagcagggct ttttggtctg gtgaataatg ctggtgtggc | |
| 421 | tggtatcatc ggacccacac catggctgac ccgggacgat ttccagcggg tgctgaatgt | |
| 481 | gaacacaatg ggtcccatcg gggtcaccct tgccctgctg cctctgctgc agcaagcccg | |
| 541 | gggccgggtg atcaacatca ccagcgtcct gggtcgcctg gcagccaatg gtgggggcta | |
| 601 | ctgtgtctcc aaatttggcc tggaggcctt ctctgacagc ctgaggcggg atgtagctca | |
| 661 | ttttgggata cgagtctcca tcgtggagcc tggcttcttc cgaacccctg tgaccaacct | |
| 721 | ggagagtctg gagaaaaccc tgcaggcctg ctgggcacgg ctgcctcctg ccacacaggc | |
| 781 | ccactatggg ggggccttcc tcaccaagta cctgaaaatg caacagcgca tcatgaacct | |
| 841 | gatctgtgac ccggacctaa ccaaggtgag ccgatgcctg gagcatgccc tgactgctcg | |
| 901 | acacccccga acccgctaca gcccaggttg ggatgccaag ctgctctggc tgcctgcctc | |
| 961 | ctacctgcca gccagcctgg tggatgctgt gctcacctgg gtccttccca agcctgccca | |
| 1021 | agcagtctac tgaatccagc cttccagcaa gagattgttt ttcaaggaca aggactttga | |
| 1081 | tttatttctg cccccaccct ggtactgcct ggtgcctgcc acaaaata | |
| 1 | mwlplllgal lwavlwllrd rqslpasnaf vfitgcdsgf grllalqldq rgfrvlascl | (SEQ ID NO:190) |
| 61 | tpsgaedlqr vassrlhttl lditdpqsvq qaakwvemhv keaglfglvn nagvagiigp | |
| 121 | tpwltrddfq rvlnvntmgp igvtlallpl lqqargrvin itsvlgrlaa ngggycvskf | |
| 181 | gleafsdslr rdvahfgirv sivepgffrt pvtnleslek tlqacwarlp patqahygga | |
| 241 | fltkylkmqq rimnlicdpd ltkvsrcleh altarhprtr yspgwdakll wlpasylpas | |
| 301 | lvdavltwvl pkpaqavy | |

[0593] (CG2151)—XP_{—}033135 thioredoxin reductase beta

| | | |
|---|---|---|
| 1 | ccggacctca ggcccagttc agtgtacttc ccctctctac ttcctccctc cagtcccttc | (SEQ ID NO:191) |
| 61 | tccatccctc ccttttttgg ctgccccttg cctgccttcc tcgccagtag cttgcagagt | |
| 121 | agacacgatg acaccttttg caggctaaaa aggctgagag tggcactatg tgcagtgagc | |
| 181 | caccatggag gaccaagcag gtcagcggga ctatgatctc ctggtggtcg gcgggggatc | |
| 241 | tggtggcctg gcttgtgcca aggaggccgc ccagctggga aggaaggtgg ccgtggtgga | |
| 301 | ctacgtggaa ccttctcccc aaggcacccg gtggggcctc ggcggcacct gcgtcaacgt | |
| 361 | gggctgcatc cccaagaagc tgatgcacca ggcggcactg ctgggaggcc tgatccaaga | |
| 421 | tgcccccaac tatggctggg aggtggccca gcccgtgccg catgactgga ggaagatggc | |
| 481 | agaagctgtt caaaatcacg tgaaatcctt gaactggggc caccgtgtcc agcttcagga | |
| 541 | cagaaaagtc aagtacttta acatcaaagc cagctttgtt gacgagcaca cggtttgcgg | |
| 601 | cgttgccaaa ggtgggaaag agattctgct gtcagccgat cacatcatca ttgctactgg | |
| 661 | agggcggccg agatacccca cgcacatcga aggtgccttg gaatatggaa tcacaagtga | |
| 721 | tgacatcttc tggctgaagg aatcccctgg aaaaacgttg gtggtcgggg ccagctatgt | |
| 781 | ggccctggag tgtgctggct tcctcaccgg gattgggctg gacaccacca tcatgatgcg | |
| 841 | cagcatcccc ctccgcggct tcgaccagca aatgtcctcc atggtcatag agcacatggc | |
| 901 | atctcatggc acccggttcc tgaggggctg tgccccctcg cgggtcagga ggctccctga | |
| 961 | tggccagctg caggtcacct gggaggacag caccaccggc aaggaggaca cgggcacctt | |
| 1021 | tgacaccgtc ctgtgggcca taggtcgagt cccagacacc agaagtctga atttggagaa | |
| 1081 | ggctggggta gatactagcc ccgacactca gaagatcctg gtggactccc gggaagccac | |
| 1141 | ctctgtgccc cacatctacg ccattggtga cgtggtggag gggcggcctg agctgacacc | |
| 1201 | catagcgatc atggccggga ggctcctggt gcagcggctc ttcggcgggt cctcagatct | |
| 1261 | gatggactac gacaatgttc ccacgaccgt cttcaccccg ctggagtatg gctgtgtggg | |
| 1321 | gctgtccgag gaggaggcag tggctcgcca cgggcaggag catgttgagg tctatcacgc | |
| 1381 | ccattataaa ccactggagt tcacggtggc tggacgagat gcatcccagt gttatgtaaa | |
| 1441 | gatggtgtgc ctgagggagc ccccacagct ggtgctgggc ctgcatttcc ttggccccaa | |
| 1501 | cgcaggcgaa gttactcaag gatttgctct ggggatcaag tgtggggctt cctatgcgca | |
| 1561 | ggtgatgcgg accgtgggta tccatcccac atgctctgag gaggtagtca agctgcgcat | |
| 1621 | ctccaagcgc tcaggcctgg accccacggt gacaggctgc tgagggtaag cgccatccct | |
| 1681 | gcaggccagg gcacacggtg cgcccgccgc cagctcctcg gaggccagac ccaggatggc | |
| 1741 | tgcaggccag gtttgggggg cctcaaccct ctcctggagc gcctgtgaga tggtcagcgt | |
| 1801 | ggagcgcaag tgctggacag gtggcccgtg tgccccacag ggatggctca ggggactgtc | |
| 1861 | cacctcaccc ctgcacctct cagcctctgc cgccgggcac ccccccccag gctcctggtg | |
| 1921 | ccagatgatg acgacctggg tggaaaccta ccctgtgggc acccatgtcc gagccccctg | |
| 1981 | gcatttctgc aatgcaaata aagagggtac tttttctgaa gtgtg | |
| 1 | medqagqrdy dllvvgggsg glacakeaaq lgrkvavvdy vepspqgtrw glggtcvnvg | (SEQ ID NO:192) |
| 61 | cipkklmhqa allggliqda pnygwevaqp vphdwrkmae avqnhvksln wghrvqlqdr | |
| 121 | kvkyfnikas fvdehtvcgv akggkeills adhiiiatgg rprypthieg aleygitsdd | |
| 181 | ifwlkespgk tlvvgasyva lecagfltgi gldttimmrs iplrgfdqqm ssmviehmas | |
| 241 | hgtrflrgca psrvrrlpdg qlqvtwedst tgkedtgtfd tvlwaigrvp dtrslnleka | |
| 301 | gvdtspdtqk ilvdsreats vphiyaigdv vegrpeltpi aimagrllvq rlfggssdlm | |
| 361 | dydnvpttvf tpleygcvgl seeeavarhg qehvevyhah ykpleftvag rdasqcyvkm | |
| 421 | vclreppqlv lglhflgpna gevtqgfalg ikcgasyaqv mrtvgihptc seevvklris | |
| 481 | krsgldptvt gcxg | |

[0594] Putative function
[0595] (CG10964)—unknown, similarity to dehydrogenases
[0596] (CG2151)—thioredoxin reductase

### Example 16

### Category 3

[0597] Line ID—418

[0598] Phenotype—Lethal phase embryonic larval phase3-pre-pupal-pupal. High mitotic index, dot-like chromosomes, strong metaphase arrest

[0599] Annotated Drosophila genome genomic segment containing P element insertion site (and map position)—AE003431 (4C 11-16)

[0600] P element insertion site—289,752

[0601] Annotated Drosophila genome Complete Genome candidate

[0602] CG3000—rap, fizzy related

(SEQ ID NO:193)

CTTTGGCTTGTTTGCTTGAAAAAACGTAACTTTTTTTGTTGTAATGAAGG
AAGCAGCACGGGCAGTAGACCAACTCGAAATCGCGCATTGCCAACACGTA
ACGTACCAGCCCGTGTAATAACAGAAGAAACCCCGAGCCGCAACAACAAC
CCCCGAAAAGCGGTAGTTGTAAGAGTTTTCCCAAAGTGGCAGCGGCAATT
ACACGGCGAGAAACGAGTTCGCGTCGCGTCCAGCTGTTTGAAAATCAAAA
TTAACCGTTTTTAGCGCGTGAAACAAGACGTTTAGAACCGTGTTCAAAAT
CCCTCGTACATAAATTGTGTGTACATTTATATATATATATATTTTCTACG
CCACGTTAACCAGACTTTTTAAGTTTTAAATTAAAACTAAAGACGTATTA
TTTTTTTTTTTTTGAGTGTTTATATTTTTTTTTTTGCAAGTTTTGTTTGG
TTACATTTGAGTTTGTGTTGAGTTTTTGCCAGCCAAAGGCGCTTAAGATG
TTTAGTCCCGAGTACGAGAAGCGCATCCTGAAGCACTACAGTCCTGTGGC
ACGGAATCTGTTCAACAACTTCGAGTCGTCCACTACGCCCACATCTCTCG
ACCGCTTCATACCCTGCAGAGCGTACAACAACTGGCAGACGAACTTTGCG
TCAATCAACAAGTCCAATGACAACTCGCCGCAGACGAGTAAGAAGCAGCG
GGACTGCGGGGAAACGGCACGCGATAGTCTCGCCTACTCCTGCCTACTGA
AGAACGAGCTCCTCGGATCGGCAATCGACGACGTGAAGACCGCCGGCGAG
GAGCGGAATGAGAATGCCTACACGCCGGCCGCAAAGCGGAGTCTCTTCAA
GTACCAGTCACCCACCAAGCAGGACTACAATGGCGAGTGTCCGTACTCGT
TGTCACCCGTCAGCGCCAAAAGTCAGAAGCTGTTGCGATCGCCGCGCAAG
GCTACGCGCAAAATCTCTCGCATTCCCTTCAAGGTGCTAGACGCGCCCGA
GTTGCAGGACGACTTCTATCTGAACCTGGTCGACTGGTCGTCGCAGAACG
TACTGGCTGTAGGCCTGGGCAGCTGTGTCTATCTGTGGAGCGCGTGCACC
AGTCAGGTTACCCGCCTGTGTGATCTCAGTCCGGATGCGAATACGGTGAC
CTCGGTGTCGTGGAACGAGCGTGGCAACACCGTGGCCGTGGGCACACATC
ACGGCTACGTGACCGTCTGGGATGTGGCGGCCAATAAGCAGATCAACAAA
CTGAATGGCCATTCGGCGCGTGTGGGCGCCTTGGCATGGAACAGTGACAT
CCTGTCGAGCGGGTCGCGAGACCGTTGGATCATACAGCGGGATACGAGAA
CGCCGCAACTGCAATCGGAGCGCAGATTGGCCGGACATCGGCAGGAGGTG
TGCGGACTGAAATGGTCACCGGATAATCAATACTTGGCCAGTGGCGGCAA
CGATAATCGGTTGTATGTGTGGAATCAGCATTCCGTGAATCCCGTACAAT
CATACACGGAGCATATGGCGGCTGTAAAGGCGATCGCGTGGTCGCCGCAT
CACCACGGACTCCTGGCCAGCGGCGGTGGAACGGCGGATAGGTGTATCCG
TTTCTGGAATACGCTGACGGGCCAGCCCATGCAGTGCGTGGACACGGGCT
CGCAGGTTTGCAATCTGGCCTGGTCCAAGCACTCCTCGGAGCTGGTCTCC
ACGCACGGCTACTCGCAGAACCAGATACTCGTGTGGAAATATCCCTCCCT
GACGCAAGTGGCCAAGCTGACGGGCCATTCGTATCGTGTGCTCTATCTGG
CGCTGAGTCCCGATGGTGAGGCTATTGTTACGGGCGCCGGCGACGAGACG
CTGCGATTTTGGAACGTATTCAGCAAGGCGCGCAGTCAGAAGGAGAACAA
GTCCGTTCTGAATCTGTTTGCCAATATCAGATAAGGACAATAACTCCAAG
CGAGCGAAGACTGAGCGAGCGCCAAAGGCAAACACAACACAACACAAAAC
AAAACAAAACAAAGCAAAGTATAATATAAATAAAATGGATACTTGAAACC
GAAAAACAAAGCCAACCAACCAATCAGCAAAAACCAAGCTGAAGCTAACA
AACTAATCGAGCCTATATGCTATATATATACAAACGATTCTTGTTCAGCA
GTCGTTTTGTAAATTGTTGTGTGACCCCACAGCAGCAATAGATTAAATAA
ATTTAAGTTAAGCAATCTGTATAGAACGGTAATTAGCAACATTTACGTAG
GTAAACACATGCAATTTATGAAGGAATAACATCAAGAGAGATGGCTGAAA
CAAGAACTGAAAATGAAACTAAGTCTATGGAAATTGTAAGTAATTGGAAA
ATCAACAACACCACACTCACACACTATCTTTAATCGACATTTTTTGTTGC
TGCTTTTTTAAATGTATTGTTTTTTTTTTGTGGTACACCTACACTACACC
TAAGAAAATTGGATACCCCTACATATACATTTATACGTTTATATATATAT
ATTTTTTTGCTAGCCTCTAAGTAACTAACTTTATTTCAAGCAAACATTTA
TACACATATTTCGCTCACTAGAAACACTCATACCCCCGAAAACACAATGT
ATATTAAATAAACTTATACAATTTCAAAATGTGCCCCAAAAAGTA

(SEQ ID NO:194)

MFSPEYEKRILKHYSPVARNLFNNFESSTTPTSLDRFIPCRAYNNWQTNF
ASINKSNDNSPQTSKKQRDCGETARDSLAYSCLLKNELLGSAIDDVKTAG
EERNENAYTPAAKRSLFKYQSPTKQDYNGECPYSLSPVSAKSQKLLRSPR
KATRKISRIPFKVLDAPELQDDFYLNLVDWSSQNVLAVGLGSCVYLWSAC
TSQVTRLCDLSPDANTVTSVSWNERGNTVAVGTHHGYVTVWDVAANKQIN
KLNGHSARVGALAWNSDILSSGSRDRWIIQRDTRTPQLQSERRLAGHRQE
VCGLKWSPDNQYLASGGNDNRLYVWNQHSVNPVQSYTEHMAAVKAIAWSP
HHHGLLASGGGTADRCIRFWNTLTGQPMQCVDTGSQVCNLAWSKHSSELV
STHGYSQNQILVWKYPSLTQVAKLTGHSYRVLYLALSPDGEAIVTGAGDE
TLRFWNVFSKARSQKENKSVLNLFANIR

[0603] Human homologue of Complete Genome candidate

[0604] XP_{—}009259 Fzr1 protein

| | | |
|---|---|---|
| 1 | ggccgcggcc gggcctgcgg gagctgcgga ggccggaggc gggcgctgtg cggtgccagg | (SEQ ID NO:195) |
| 61 | agaggcgggg tcggcgggag ccagcgagcc acgggagcga gccaggctaa ccttgccgcg | |
| 121 | ggccgagccc tgcctcgcca tggaccagga ctatgagcgg cgcctgcttc gccagatcgt | |
| 181 | catccagaat gagaacacga tgccacgcgt cacagagatg cggcggaccc tgacgcctgc | |
| 241 | cagctcccca gtgtcctcgc ccagcaagca cggagaccgc ttcatcccct ccagagccgg | |
| 301 | agccaactgg agcgtgaact tccacaggat taacgagaat gagaagtctc ccagtcagaa | |
| 361 | ccggaaagcc aaggacgcca cctcagacaa cggcaaagac ggcctggcct actctgccct | |
| 421 | gctcaagaat gagctgctgg gtgccggcat cgagaaggtg caggacccgc agactgagga | |
| 481 | ccgcaggctg cagccctcca cgcctgagaa gaagggtctg ttcacgtatt cccttagcac | |
| 541 | caagcgctcc agccccgatg acggcaacga tgtgtctccc tactccctgt ctcccgtcag | |
| 601 | caacaagagc cagaagctgc tccggtcccc ccggaaaccc acccgcaaga tctccaagat | |
| 661 | ccccttcaag gtgctggacg cgcccgagct gcaggacgac ttctacctca atctggtgga | |
| 721 | ctggtcgtcc ctcaatgtgc tcagcgtggg gctaggcacc tgcgtgtacc tgtggagtgc | |
| 781 | ctgtaccagc caggtgacgc ggctctgtga cctctcagtg gaaggggact cagtgacctc | |
| 841 | cgtgggctgg tctgagcggg ggaacctggt ggcggtgggc acacacaagg gcttcgtgca | |
| 901 | gatctgggac gcagccgcag ggaagaagct gtccatgttg gagggccaca cggcacgcgt | |
| 961 | cggggcgctg gcctggaatg ctgagcagct gtcgtccggg agccgcgacc gcatgatcct | |
| 1021 | gcagagggac atccgcaccc cgccactgca gtcggagcgg cggctgcagg gccaccggca | |
| 1081 | ggaggtgtgc gggctcaagt ggtccacaga ccaccagctc ctcgcctcgg ggggcaacga | |
| 1141 | caacaagctg ctggtctgga atcactcgag cctgagcccc gtgcagcagt acacggagca | |
| 1201 | cctggcggcc gtgaaggcca tcgcctggtc cccacatcag cacgggctgc tggcctcggg | |
| 1261 | gggcggcaca gctgaccgct gtatccgctt ctggaacacg ctgacaggac aaccactgca | |
| 1321 | gtgtatcgac acgggctccc aagtgtgcaa tctggcctgg tccaagcacg ccaacgagct | |
| 1381 | ggtgagcacg cacggctact cacagaacca gatccttgtc tggaagtacc cctccctgac | |
| 1441 | ccaggtggcc aagctgaccg ggcactccta ccgcgtgctg tacctggcaa tgtcccctga | |
| 1501 | tggggaggcc atcgtcactg gtgctggaga cgagaccctg aggttctgga acgtctttag | |
| 1561 | caaaacccgt tcgacaaagg agtctgtgtc tgtgctcaac ctcttcacca ggatccggta | |
| 1621 | aacctgccgg gcaggaccgt gccacaccag ctgtccagag tcggaggacc ccagctcctc | |
| 1681 | agcttgcatg gactctgcct tcccagcgct tgtcccccga ggaaggcggc tgggcgggcg | |
| 1741 | gggagctggg cctggaggat cctggagtct cattaaatgc ctgattgtga accatgtcca | |
| 1801 | ccagtatctg gggtgggcac gtggtcgggg accctcagca gcaggggctc tgtctccctt | |
| 1861 | cccaaagggc gagaaccaca ttggacggtc ccggctcaga ccgtctgtac tcagagcgac | |
| 1921 | ggatgccccc tgggaccctc actgcctccg tctgttcatc acctgcccac cggagccgca | |
| 1981 | tgctcttcct ggaactgccc acgtctgcac agaacagacc accagacgcc agggctgatt | |
| 2041 | ggtgggggcc tgagaccccg gttgcccatt catggctgca ccccaccatg tcaaacccaa | |
| 2101 | gaccagcccc aaggccagac caaggcatgt aggcctgggc aggtggctcg gggccactgg | |
| 2161 | cggagccagc ctgtggatcc aagagacagt ccccacctgg gcttcacggc atccttgcag | |
| 2221 | ccacctctgc tgtcactgct cgaagcagca gtctctctgg aagcatctgt gtcatggcca | |
| 2281 | tcgcccggcg gtcagtgggc ttcagatggg cctgtgcatc ctggccaagc gtcaccctca | |
| 2341 | cactggagga ggatgtctgc tctggactta tcaccccagg agaactgaac ccggacctgc | |
| 2401 | tcactgccct ggctggagag gagcacaaca gatgccacgt cttcgtgcat tcgccaacac | |
| 2461 | gtgccctcac agggccagcg tcctccttcc ctgcgcaaga cttgcgtccc ccatgcctgc | |
| 2521 | tgggtggctg ggtcctgtgg aggccagcag cggtgtggcc cccgccccca ggctgcctgt | |
| 2581 | gtcttcacct gtcctgtcca ccagcgccaa cagccgtggg gaagccaagg agacccaagg | |
| 2641 | ggtccaggag gtgggcgccc tccatccttc gagaagcttc ccaggctcct ctgcttctct | |
| 2701 | gtctcatgct cccaggctgc acagcaggca gggagggagg caaggcaggg gagtggggcc | |
| 2761 | tgagctgagc actgccccct caccccccca ccaccccttc ccatttcatc ggtggggacg | |
| 2821 | tggagagggt ggggcgggct ggggttggag ggtcccaccc accaccctgc tgtgcttggg | |
| 2881 | aacccccact ccccactccc cacatcccaa catcctggtg tctgtcccca gtggggttgg | |
| 2941 | cgtgcatgtg tacatatgta tttgtgactt ttctttgg | |
| 1 | mdqdyerrll rqiviqnent mprvtemrrt ltpasspvss pskhgdrfip sraganwsvn | (SEQ ID NO:196) |
| 61 | fhrineneks psqnrkakda tsdngkdgla ysallknell gagiekvqdp qtedrrlqps | |
| 121 | tpekkglfty slstkrsspd dgndvspysl spvsnksqkl lrsprkptrk iskipfkvld | |
| 181 | apelqddfyl nlvdwsslnv lsvglgtcvy lwsactsqvt rlcdlsvegd svtsvgwser | |
| 241 | gnlvavgthk gfvqiwdaaa gkklsmlegh tarvgalawn aeqlssgsrd rmilqrdirt | |
| 301 | pplqserrlq ghrqevcglk wstdhqllas ggndnkllvw nhsslspvqq ytehlaavka | |
| 361 | iawsphqhgl lasgggtadr cirfwntltg qplqcidtgs qvcnlawskh anelvsthgy | |
| 421 | sqnqilvwky psltqvaklt ghsyrvlyla mspdgeaivt gagdetlrfw nvfsktrstk | |
| 481 | esvsvlnlft rir | |

[0605] Putative function
[0606] Cell cycle regulator involved in cyclin degradation

### Example 17

### Category 3

[0607] Line ID—121

[0608] Phenotype—Lethal phase larval phase 3—prepupal—pupal—pharate adult-adult. High mitotic index, dot and rod-like overcondensed chromosomes, high frequency of polyploids

[0609] Annotated Drosophila genome genomic segment containing P element insertion site (and map position)—AE003493 (12B7)

[0610] P element insertion site—not determined

[0611] Annotated Drosophila genome Complete Genome candidate

[0612] CG10988—1(1)dd4 gamma tubulin ring complex

(SEQ ID NO:197)

TAACACTGCACTAAATAATTTTAATAAATTATTTGTATGAAGTACGCGCC
AATTGGATGCGTTTTTGTCCTATCTGTCGAAGATTTCACGCATCCCGAAC
AATTGCCAGTGACTGCACGCCGTATTATAGCCAGGGAACAGCTGTGCGTT
TGCCATTGGCCAACAGTTGTTGTCCACTTCGCAATTACCAAGCCATCCAA
AATCGGCTGTTTAACGCGCGCTTGATTGGATATTTATGAACAATTCAGTG
CACCAGGATGTCGCAGGACAGGATCGCCGGCATCGATGTGGCAACCAATT
CCACTGATATATCGAATATCATTAACGAGATGATCATCTGCATCAAGGGC
AAGCAGATGCCCGAAGTTCACGAAAAAGCAATGGATCATTTAAGCAAAAT
GATTGCCGCCAATAGTCGGGTCATTCGGGACTCAAATATGTTGACTGAGC
GCGAATGTGTCCAGAAGATAATGAAACTGCTGAGCGCCCGGAATAAGAAG
GAGGAGGGCAAAACTGTGTCGGATCACTTCAATGAGCTGTACAGGAAACT
CACGTTGACCAAGTGCGATCCGCACATGAGGCACTCGCTAATGACCCATC
TACTTACGATGACCGACAATTCGGATGCCGAAAAGGCAGTTGCCAGCGAA
GATCCACGTACTCAGTGCGATAATCTCACTCAGATTCTGGTCAGTCGTCT
TAACTCAATAAGTTCCTCCATAGCCAGTCTGAATGAGATGGGAGTGGTCA
ACGGAAATGGAGTAGGAGCAGCAGCGGTAACAGGAGCAGCAGCGGTAACA
GGAGCAGCAGCGGTAACAGGAGCAGCAGCGGTAACAGGAGCAGCAGCAAG
CCACAGTTATGATGCCACACAGTCCAGCATCGGATTGAGAAAACAGTCCT
TGCCCAACTACCTGGATGCAACAAAGATGTTGCCCGAGTCTCGACATGAT
ATAGTGATGAGTGCCATTTACTCCTTCACCGGCGTTCAAGGGAAGTATTT
GAAGAAGGATGTGGTAACGGGCCGTTTCAAGCTGGATCAGCAGAACATCA
AGTTCCTGACCACCGGCCAAGCGGGCATGTTGCTGCGGCTCTCCGAACTT
GGCTACTACCACGATCGAGTGGTCAAGTTTTCGGATGTATCGACCGGTTT
CAATGCCATTGGCAGCATGGGCCAGGCCCTGATTTCCAAACTCAAGGAGG
AGCTGGCGAATTTTCACGGGCAAGTGGCAATGCTTCACGATGAAATGCAG
CGTTTTCGGCAGGCCTCGGTGAATGGAATTGCAAACAAGGGGAAAAAGGA
TAGTGGGCCCGATGCTGGCGATGAAATGACGCTATTCAAGCTGCTCGCCT
GGTATATAAAGCCACTGCACCGGATGCAGTGGTTAACCAAGATTGCCGAC
GCCTGCCAGGTAAAGAAGGGCGGTGATTTGGCATCGACCGTTTATGATTT
CCTTGACAACGGTAACGATATGGTCAATAAATTGGTGGAGGATCTCCTAA
CTGCCATTTGTGGCCCACTGGTGCGCATGATCTCCAAATGGATTCTGGAG
GGCGGCATTAGCGATATGCATAGAGAGTTCTTTGTGAAGTCCATTAAAGA
TGTGGGCGTTGATCGGCTATGGCACGATAAATTCCGCCTACGATTGCCAA
TGCTGCCCAAGTTTGTGCCCATGGATATGGCCAATAAGATACTCATGACG
GGCAAATCCATTAATTTTCTAAGAGAAATCTGCGAGGAGCAGGGTATGAT
GAAGGAGCGCGACGAACTAATGAAGGTCATGGAATCTAGTGCCTCTCAAA
TCTTTTCGTACACACCGGACACCAGTTGGCATGCGGCCGTGGAAACGTGC
TACCAGCAGACCTCCAAACATGTCCTCGACATTATGGTGGGCCCACACAA
GCTGCTGGATCATTTGCACGGAATGCGGCGCTACTTGCTGTTGGGCCAGG
GCGATTTTATTAGCATTCTGATTGAAAACATGAAGAACGAACTGGAGCGA
CCGGGCCTTGATATATATGCTAACGATCTCACCTCCATGTTGGATTCCGC
TCTGCGCTGTACGAATGCCCAGTACGATGATCCTGATATTCTAAACCATC
TCGATGTGATTGTTCAACGACCGTTCAACGGTGATATTGGCTGGAACATC
ATCTCGCTGCAGTACATTGTCCACGGACCACTGGCCGCCATGCTGGAGTC
GACCATGCCAACGTACAAGGTGCTCTTCAAGCCACTCTGGCGCATGAAGC
ACATGGAGTTTGTGCTCTCGATGAAGATCTGGAAGGAGCAGATGGGCAAC
GCAAAGGCCCTTCGTACAATGAAGTCCGAAATCGGCAAGGCGTCACACCG
CCTCAACCTTTTCACTTCCGAGATCATGCACTTTATCCACCAAATGCAGT
ACTATGTGCTATTTGAGGTCATCGAGTGCAACTGGGTGGAGCTACAGAAG
AAGATGCAGAAGGCTACTACGTTGGACGAAATCCTGGAAGCTCACGAGAA
GTTTCTGCAAACGATTTTGGTGGGCTGTTTTGTCAGCAACAAAGCGAGTG
TGGAGCATTCGCTGGAGGTGGTGTACGAGAACATTATCGAATTGGAGAAG
TGGCAGTCGAGCTTTTACAAGGACTGCTTTAAGGAGCTAAATGCCCGCAA
GGAACTGTCCAAAATTGTGGAGAAATCGGAAAAGAAGGGTGTCTACGGAC
TGACCAACAAGATGATCCTGCAGCGCGACCAGGAGGCGAAGATATTTGCC
GAAAAGATGGACATCGCCTGCCGCGGCTTAGAAGTCATAGCAACCGATTA
CGAAAAGGCTGTCAGCACTTTCCTAATGTCTCTCAACTCTAGCGACGATC
CGAATTTGCAGCTCTTTGGCACTCGGCTGGACTTCAACGAGTACTACAAG
AAGAGGGACACCAATTTGAGCAAACCCCTGACCTTCGAGCACATGCGCAT
GAGCAATGTGTTCGCCGTGAACAGTCGCTTCGTGATATGTACGCCGTCCA
CTCAGGAATAGCGACCAATGTCCATGCAATCGGTTTATCCCAGTGTCCAT
ACATCATACCAAATCCCAAATCCCATACAGCATCAGCACTCCATTCAGTT
CAATTGCTGCTAAATATTTGAGATATCTCGATATCATTGGAGCCAATCCA
ACCAAACAAACTAATCCAATTATTAACTAAGCCTTCGAATCGAAAACAAC
CTCTATACATATATATCTCAAGCTTTGCCGTCAATCGCCTGGCTGCAAGC
CATCAACTTAAGATATCTCCAATACAAAATTATTGAGTAGTTGTAACGAA
AGTATTAAGCGACAATTTGTTTGTCGAAAAACGCAACGTTCTATTTTGTT
TGCGAATCCCATAATTTTTTTTACATCGAAGCTTAGTTGAAATAGATTTT
CGTAAGTGCATTTGCCAATTGCCATGTTGTAATTAAAGAGAATAAGAGAA
TGTTACGTACTTTAAAAGAATGTTTTAAAAAAGTTAATGTTTTGAACAGT
TTTAAACCGTAATGCGAG

(SEQ ID NO:198)

MSQDRIAGIDVATNSTDISNIINEMIICIKGKQMPEVHEKAMDHLSKMIA
ANSRVIRDSNMLTERECVQKIMKLLSARNKKEEGKTVSDHFNELYRKLTL
TKCDPHMRHSLMTHLLTMTDNSDAEKAVASEDPRTQCDNLTQILVSRLNS
ISSSIASLNEMGVVNGNGVGAAAVTGAAAVTGAAAVTGAAAVTGAAASHS
YDATQSSIGLRKQSLPNYLDATKMLPESRHDIVMSAIYSFTGVQGKYLKK
DVVTGRFKLDQQNIKFLTTGQAGMLLRLSELGYYHDRVVKFSDVSTGFNA
IGSMGQALISKLKEELANFHGQVAMLHDEMQRFRQASVNGIANKGKKDSG
PDAGDEMTLFKLLAWYIKPLHRMQWLTKIADACQVKKGGDLASTVYDFLD
NGNDMVNKLVEDLLTAICGPLVRMISKWILEGGISDMHREFFVKSIKDVG
VDRLWHDKFRLRLPMLPKFVPMDMANKILMTGKSINFLREICEEQGMMKE
RDELMKVMESSASQIFSYTPDTSWHAAVETCYQQTSKHVLDIMVGPHKLL
DHLHGMRRYLLLGQGDFISILIENMKNELERPGLDIYANDLTSMLDSALR
CTNAQYDDPDILNHLDVIVQRPFNGDIGWNIISLQYIVHGPLAAMLESTM
PTYKVLFKPLWRMKHMEFVLSMKIWKEQMGNAKALRTMKSEIGKASHRLN
LFTSEIMHFIHQMQYYVLFEVIECNWVELQKKMQKATTLDEILEAHEKFL
QTILVGCFVSNKASVEHSLEVVYENIIELEKWQSSFYKDCFKELNARKEL
SKIVEKSEKKGVYGLTNKMILQRDQEAKIFAEKMDIACRGLEVIATDYEK
AVSTFLMSLNSSDDPNLQLFGTRLDFNEYYKKRDTNLSKPLTFEHMRMSN
VFAVNSRFVICTPSTQE

[0613] Human homologue of Complete Genome candidate

[0614] AAC39727—spindle pole body protein spc98 homolog GCP3

| | | |
|---|---|---|
| 1 | caggaagggc gcgggccgcg gtccctgcgc gtgcggcggc agtggcggct ctgcccggac | (SEQ ID NO:199) |
| 61 | caccgtgcac ggctccgggc gaggatggcg accccggacc agaagtcgcc gaacgttctg | |
| 121 | ctgcagaacc tgtgctgcag gatcctgggc aggagcgaag ctgatgtagc ccagcagttc | |
| 181 | cagtatgctg tgcgggtgat tggcagcaac ttcgccccaa ctgttgaaag agatgaattt | |
| 241 | ttagtagctg aaaaaatcaa gaaagagctt attcgacaac gaagagaagc agatgctgca | |
| 301 | ttattttcag aactccacag aaaacttcat tcacagggag ttttgaaaaa taaatggtca | |
| 361 | atactctacc tcttgctgag cctcagtgag gacccacgca ggcagccaag caaggtttct | |
| 421 | agctatgcta cgttatttgc tcaggcctta ccaagagatg cccactcaac cccttactac | |
| 481 | tatgccaggc ctcagaccct tcccctgagc taccaagatc ggagtgccca gtcagcccag | |
| 541 | agctccggca gcgtgggcag cagtggcatc agcagcattg gcctgtgtgc cctcagtggc | |
| 601 | cccgcgcctg cgccacaatc tctcctccca ggacagtcta atcaagctcc aggagtagga | |
| 661 | gattgccttc gacagcagtt ggggtcacga ctcgcatgga ctttaactgc aaatcagcct | |
| 721 | tcttcacaag ccactacctc aaaaggtgtc cccagtgctg tgtctcgcaa catgacaagg | |
| 781 | tccaggagag aaggggatac gggtggtact atggaaatta cagaagcagc tctggtaagg | |
| 841 | gacattttgt acgtctttca gggcatagat ggcaaaaaca tcaaaatgaa caacactgaa | |
| 901 | aattgttaca aagtagaagg aaaggcaaat ctaagtaggt ctttgagaga cacagcagtc | |
| 961 | aggctttctg agttgggatg gttgcataat aaaatcagaa gatacacgga ccagaggagc | |
| 1021 | ctggaccgct cattcggact cgtcgggcag agcttttgtg ctgccttgca ccaggaactc | |
| 1081 | agagaatact atcgattgct ctctgtttta cattctcagc tacaactaga ggatgaccag | |
| 1141 | ggtgtgaatt tgggacttga gagtagttta acacttcggc gcctcctggt ttggacctat | |
| 1201 | gatcccaaaa tacgactgaa gacccttgcg gccctagtgg accactgcca aggaaggaaa | |
| 1261 | ggaggtgagc tggcctcagc tgtccacgcc tacacaaaaa caggagaccc gtacatgcgg | |
| 1321 | tctctggtgc agcacatcct cagcctcgtg tctcatcctg ttttgagctt cctgtaccgc | |
| 1381 | tggatatatg atggggagct tgaggacact taccacgaat tttttgtagc atcagatcca | |
| 1441 | acagttaaaa cagatcgact gtggcacgac aagtatactt tgaggaaatc gatgattcct | |
| 1501 | tcgtttatga cgatggatca gtctaggaag gtccttttga taggaaaatc aataaatttc | |
| 1561 | ttgcaccaag tttgtcatga tcagactccc actacaaaga tgatagctgt gaccaagtct | |
| 1621 | gcagagtcac cccaggacgc tgcagaccta ttcacagact tggaaaatgc atttcagggg | |
| 1681 | aagattgatg ctgcttattt tgagaccagc aaatacctgt tggatgttct caataaaaag | |
| 1741 | tacagcttgc tggaccacat gcaggcaatg aggcggtacc tgcttcttgg tcaaggagac | |
| 1801 | tttataaggc acttaatgga cttgctaaaa ccagaacttg tccgtccagc tacgactttg | |
| 1861 | tatcagcata acttgactgg aattctagaa accgctgtca gagccaccaa cgcacagttt | |
| 1921 | gacagtcctg agatcctgcg aaggctggac gtgcggctgc tggaggtctc tccaggtgac | |
| 1981 | actggatggg atgtcttcag cctcgattat catgttgacg gaccaattgc aactgtgttt | |
| 2041 | actcgagaat gtatgagcca ctacctaaga gtatttaact tcctctggag ggcgaagcgg | |
| 2101 | atggaataca tcctcactga catacggaag ggacacatgt gcaatgcaaa gctcctgaga | |
| 2161 | aacatgccag agttctccgg ggtgctgcac cagtgtcaca ttttggcctc tgagatggtc | |
| 2221 | catttcattc atcagatgca gtattacatc acatttgagg tgcttgaatg ttcttgggat | |
| 2281 | gagctttgga acaaagtcca gcaggcccag gatttggatc acatcattgc tgcacacgag | |
| 2341 | gtgttcttag acaccatcat ctcccgctgc ctgctggaca gtgactccag ggcactttta | |
| 2401 | aatcaactta gagctgtgtt tgatcaaatt attgaacttc agaatgctca agatgcaata | |
| 2461 | tacagagctg ctctggaaga attgcagaga cgattacagt ttgaagagaa aaagaaacag | |
| 2521 | cgtgaaattg agggccagtg gggagtgacg gcagcagagg aagaggagga aaataagagg | |
| 2581 | attggagaat ttaaagaatc tataccaaaa atgtgctcac agttgcgaat attgacccat | |
| 2641 | ttctaccagg gtatcgtgca gcagtttttg gtgttactga cgaccagctc tgacgagagt | |
| 2701 | cttcggtttc ttagcttcag gctggacttc aacgagcatt acaaagccag ggagcccagg | |
| 2761 | ctccgtgtgt ctctgggtac cagggggcgg cgcagctccc acacgtgaag ctcgcggtcc | |
| 2821 | tcccagggag ctgcgggtga tgttcgttgc actgctagac acgaaattcc cattgacgtc | |
| 2881 | ctgcaggaac tgcatgctgc aggtgtcctg cccttccgcc cacgagtgcg ccatgtttca | |
| 2941 | gcggagcggc gtgtgggaga agccacgtcg tgtttcacat gtcggagtcg aatgcatttg | |
| 3001 | taaatcccta agtcaagtag gctggctgca ctgttcacat ttgtctctaa aagtcttcat | |
| 3061 | cgctaaaaga taccataatt tgctgaggct tcttaagctt tctatgttat aatttatatt | |
| 3121 | tgtcacttta aaaaatccat ttcttttaga aaaaattagg gtgataggat attcattagt | |
| 3181 | taagatggta acgtcattgc tattttttta acatcctctt tagaggtaat ttttgttaac | |
| 3241 | ataaccaaaa attaaattga aacaaaatgt cccaactaag aaaatatata gagcatttta | |
| 3301 | ttttttttta gtgttgtaaa atattaacct ctgtgagatc ctttgtatct taatgcatta | |
| 3361 | cctttacaca tatttattct tattttctct cctttcagag tttacatttt tatatttaat | |
| 3421 | ttactatttc agatttttaa aatagtatag aaaaaagtag gagtgataga gaacaaaaat | |
| 3481 | actcttatac agtgcaaccc aaataccgcg aatgcatcag ctaaagcagc gtgtaaatag | |
| 3541 | gagtgatgag aaagttaatg gagtatttta ttttcaaagt tcctgataag cattggaaag | |
| 3601 | aaatcgacat ggataatgaa gatttccttt ttccttgcct attttttcat tgtaaatatt | |
| 3661 | tatatactac tgaccaagat gttggggtgg gggggattgt tttttgtaaa aatgtcatta | |
| 3721 | tcaggtcaca taaatctgcc tttatgttgc ataagtgaaa atttagaaaa ttaaaagcaa | |
| 3781 | ttatctttca aaaaa | |
| 1 | matpdqkspn vllqnlccri lgrseadvaq qfqyavrvig snfaptverd eflvaekikk | (SEQ ID NO:200) |
| 61 | elirqrread aalfselhrk lhsqgvlknk wsilylllsl sedprrqpsk vssyatlfaq | |
| 121 | alprdahstp yyyarpqtlp lsyqdrsaqs aqssgsvgss gissiglcal sgpapapqsl | |
| 181 | lpgqsnqapg vgdclrqqlg srlawtltan qpssqattsk gvpsavsrnm trsrregdtg | |
| 241 | gtmeiteaal vrdilyvfqg idgknikmnn tencykvegk anlsrslrdt avrlselgwl | |
| 301 | hnkirrytdq rsldrsfglv gqsfcaalhq elreyyrlls vlhsqlqled dqgvnlgles | |
| 361 | sltlrrllvw tydpkirlkt laalvdhcqg rkggelasav haytktgdpy mrslvqhils | |
| 421 | lvshpvlsfl yrwiydgele dtyheffvas dptvktdrlw hdkytlrksm ipsfmtmdqs | |
| 481 | rkvlligksi nflhqvchdq tpttkmiavt ksaespqdaa dlftdlenaf qgkidaayfe | |
| 541 | tskylldvln kkyslldhmq amrrylllgq gdfirhlmdl lkpelvrpat tlyqhnltgi | |
| 601 | letavratna qfdspeilrr ldvrllevsp gdtgwdvfsl dyhvdgpiat vftrecmshy | |
| 661 | lrvfnflwra krmeyiltdi rkghmcnakl lrnmpefsgv lhqchilase mvhfihqmqy | |
| 721 | yitfevlecs wdelwnkvqq aqdldhiiaa hevfldtiis rclldsdsra llnqlravfd | |
| 781 | qiielqnaqd aiyraaleel qrrlqfeekk kqreiegqwg vtaaeeeeen krigefkesi | |
| 841 | pkmcsqlril thfyqgivqq flvllttssd eslrflsfrl dfnehykare prlrvslgtr | |
| 901 | grrssht | |

[0615] Putative function
[0616] Component of the centrosome

### Example 18

### Category 3

[0617] LineID—237

[0618] Phenotype—Lethal phase larval stage 3 (few pupae). High mitotic index, colchicine-type overcondensation of chromosomes, polyploid cells, ‘mininuclei’ formation

[0619] Annotated Drosophila genome genomic segment containing P element insertion site (and map position)—AE0086 (10C4-5)

[0620] P element insertion site—182,487

[0621] Annotated Drosophila genome Complete Genome candidate
[0622] 2 candidates:

[0623] CG 1558—novel protein

(SEQ ID NO:201)

ATGGAGCCAGCCGAAAGTCCAGAAAAATTAATGAAATTCGTACGCCGCAG
TGACGTACTGGAATACGTGGGCAACACGAGTGCCGTCGATCTATCGAGCG
GTGATCTCTCCGACATCGATCTCAAGGACGTGCCGGCCCAACTGGAGGCC
ACTTTGAAACCGCGTCGCTATGAAGCAAGCACTTTGTTTAACATTGACCT
GGACGATATCTGGGATCCTAGCTGTCAGGAGGACGAGGTGCAGCAGTACA
AGGAGCGCGCCCAGAAGGAGCAGCAAAAGTTCTTCGACTTTGTAATGCAT
GCGGCACTGGACACGGACAATCGCAAGGTTAGCTTCAAGCCAAACAAGGA
GCAGCAGCGTTACCTAGATCAGGGACCCAATTTGCAAAACTTCGTGCGAA
GCTCGTTGGCTTTCACAAACGCGGCCATCCGATTTCAGGCGGAGCACGAG
GACATGATGGAGCTGCAGTGCAATATGGACGATCACTACCTATTCATGCG
GAACACCATGATCAACAACGCTATACACCAGAATATGGCCAACCAACGGT
GACCCTAAGCTATGCATAAATATACATATGTGAATTGTAGATATTGATAA
ATTAAATTAAGACTCAGAGATTGTAAGACGGTTTGCTTTTGGCTTATACA
GTATAATTCGCTTAGCTGCCTCGAGTACTTTGCACAATGCCTCGATGCAG
GTAACTTAAAAATGCAGCTAACTTAATTTTTTTTTTTCTATTTTCTATTT
TCTATTCACAC

(SEQ ID NO:202)

MEPAESPEKLMKFVRRSDVLEYVGNTSAVDLSSGDLSDIDLKDVPAQLEA
TLKPRRYEASTLFNIDLDDIWDPSCQEDEVQQYKERAQKEQQKFFDFVMH
AALDTDNRKVSFKPNKEQQRYLDQGPNLQNFVRSSLAFTNAAIRFQAEHE
DMMELQCNMDDHYLFMRNTMINNAIHQNMANQR

[0624] CG11697—novel protein

(SEQ ID NO:203)

ATGATTTATGCGATCGTGATACACATACTGTCCCTTCTGGTGGGCTGTTT
CTATCCAGCATTCGCGTCCTACAAGATCCTGAAAAGTCAGAATTGTAGCG
TCAATGATCTTCGCGGATGGTTAATCTACTGGATTGCCTATGGAGTTTAT
GTGGCCTTTGATTATTTCACAGCGGGTCTGCTGGCATTTATTCCATTGCT
AAGTGAGTTCAAGGTGCTTCTCCTGTTCTGGATGTTGCCCTCTGTGGGCG
GCGGCAGTGAGGTGATCTACGAGGAGTTCCTGCGATCCTTTAGCTGTAAC
GAATCCTTCGACCAGGTCCTGGGACGTATCACCTTGGAATGGGGCGAATT
GGTGTGGCAACAAGTTTGCTCCGTTCTTAGCCATTTGATGGTTTTGGCAG
ATCGCTATCTCCTGCCCAGCGGTCATCGTCCTGCCCTCCAAATAACGCCC
AGCATCGAGGATCTGGTCAACGATGCCATAGCCAAAAGGCAGTTGGAAGA
GAAGCGGAAACAGATGGGTAACTTATCTGATACCATCAACGAGGTTTTGG
GAGAAAATATCGATTTAAATATGGATCTGCTGCACGGATCCGAATCTGAT
TTATTGGTTATTAAGGAGCCTATTTCCAAGCCCAAGGAGAGACCAATACC
GCCGCCGAAGCCAATGCGTCAGCCATCATCAAGCAACCAGCAAGAAATGA
ATCTTTCGTCGCAGTTTATGTGA

(SEQ ID NO:204)

MIYAIVIHILSLLVGCFYPAFASYKILKSQNCSVNDLRGWLIYWIAYGVY
VAFDYFTAGLLAFIPLLSEFKVLLLFWMLPSVGGGSEVIYEEFLRSFSCN
ESFDQVLGRITLEWGELVWQQVCSVLSHLMVLADRYLLPSGHRPALQITP
SIEDLVNDAIAKRQLEEKRKQMGNLSDTINEVLGENIDLNMDLLHGSESD
LLVIKEPISKPKERPIPPPKPMRQPSSSNQQEMNLSSQFM

[0625] Human homologue of Complete Genome candidate
[0626] (CG1558)—none

[0627] (CG1 1697)—BAB14444 unamed protein—similar to a hypothetical protein in the region deleted in human familial adenomatous polyposis 1

| | | |
|---|---|---|
| 1 | aacgccgggc agggcggcgg gcgcgctcag tctggcggcg gctgccgtga gctgactgac | (SEQ ID NO:205) |
| 61 | gttccgggaa cgccgcagca gcccgcgccg cccgcagcct agccgagccg cgccgcccgg | |
| 121 | gcctcgcccg cccgcctgcc cgccatggtg tcatggatca tctccaggct ggtggtgctt | |
| 181 | atatttggca ccctttaccc tgcgtattat tcctacaagg ctgtgaaatc aaaggacatt | |
| 241 | aaggaatatg tcaaatggat gatgtactgg attatatttg cacttttcac cacagcagag | |
| 301 | acattcacag acatcttcct ttgttggttt ccattctatt atgaactaaa aatagcattt | |
| 361 | gtagcctggc tgctgtctcc ctacacaaaa ggctccagcc tcctgtacag gaagtttgta | |
| 421 | catcccacac tatcttcaaa agaaaaggaa atcgatgatt gtctggtcca agcaaaagac | |
| 481 | cgaagttacg atgcccttgt gcacttcggg aagcggggct tgaacgtggc cgccacagcg | |
| 541 | gctgtgatgg ctgcttccaa gggacagggt gccttatcgg agagactgcg gagcttcagc | |
| 601 | atgcaggacc tcaccaccat caggggagac ggcgcccctg ctccctcggg ccccccacca | |
| 661 | ccggggtctg ggcgggccag cggcaaacac ggccagccta agatgtccag gagtgcttct | |
| 721 | gagagcgcta gcagctcagg caccgcctag aatccttcga tctcgcttca ggaagaaaag | |
| 781 | tacctcatcc tcggccaccg aaaccacgtg agtgagatga gccaacagca ccggatccac | |
| 841 | agaatgtttc ttctctgcct taaagagcta ttcactaata acatagaaat ccgcaagctg | |
| 901 | ggtgtgcttt gagtgtgcag cctcacaaac atggcctttt ctctctcccc ttccactttt | |
| 961 | aaggatttat ttttttcccc cttttcttta ttttgctggg gagaggctaa agggaaaggt | |
| 1021 | agtaggggcg ggggtggtga cctttaagtc ttctgaggtt ggtaattttc cacaattgga | |
| 1081 | ttgtcattat agacagcagt gtgtttttta gaaagataag agaatcaccc ctatgctgct | |
| 1141 | gagatgtaca tttgtaattt atctgttgca tacttagttt ttagtcctgt aaatgcaaac | |
| 1201 | acagcatttt ttacaacttt ctttgttctt ggtacttata ctttgaacta tgatgtacat | |
| 1261 | atttatggct tttggctttt aatataatgg acttgcaagg gctgccagag gttctgatat | |
| 1321 | gtaagaaaac tgcaaaaaca aatatagaca aatattttga ttctagagaa cgtctcagat | |
| 1381 | gtgcttataa agcttccaaa tacaactcca gtaagacatc cctttccctg caggagtgtg | |
| 1441 | gtctatattc tttagatagt tgtttagtca aaagaccaga caagttacaa actaagagaa | |
| 1501 | acaatatttc acaacacagt aaagtgtgat gagaggtcag gggaacatcc cagtaaaaga | |
| 1561 | gaagagtcac aggaagctca tctcctccct ggattctgga ttaggagctt ctgaatcttt | |
| 1621 | tccagggata ggcaggtagc tcactcttgg tgcaatttct tgaggatggg aacatgtaga | |
| 1681 | gctgctggaa ggagtaattc tgtgcttgac aaaggacgat ttctccttta tcgtgaccag | |
| 1741 | tgctgccgat ttcctgacag aggagcttac actctgagca ccttgtttta gcgaactcta | |
| 1801 | gcaaaacttg tttagcttag caaaaacaaa cacacaaaaa actgagaact ctgctgtttc | |
| 1861 | agatatgcca taacatacat ctgaaacaca tgtgtaacaa tcaaaatggt gggctctaga | |
| 1921 | atggttttgg agctcgagat cttcatgggt tagacttgct ggtcagaccc aggagcacct | |
| 1981 | gtggctcaca ccttctgttc ccctcctggc ctgtgcagaa tgtaaacagc agactcatac | |
| 2041 | tcaatgggca ctacaggcct tatcagacgt tttatacaag cctggattgc ttagtagggg | |
| 2101 | aataaggcat tctctgaggg ggctttccac ttagattgag aattttattt gaaaagaatc | |
| 2161 | tggtttaaat ggcattgtgg tccgaggtag ctgctctccc cactgagagc tgagccgaaa | |
| 2221 | tataagaata atatatttgt gcttcgagtt ggtgtttctt tcagtgtaat gcatgcagtg | |
| 2281 | gtcacaaccc agttactcat aatatttgga ttgtatttgt tcgtagatat gcccagaaga | |
| 2341 | ctagagaatt agtgttatat accatataga acttactgtc agtcaactat aaacaggccc | |
| 2401 | aattaaaaac tgttccatta ctacgcaaac acatattaga ggcctttgct gatgacacat | |
| 2461 | tagctggatc ttagccaccc cagaaagggt ttgatttgaa gctgattgtt gccagatatg | |
| 2521 | catattggaa tcccatctac ccatagttcc tctgaaggtg attttgtaat ttgcaaaagg | |
| 2581 | gtataggaaa atatacctaa aagcgaattt gtggctgaga ggataaacag aagctgtttg | |
| 2641 | ctcatgttct gtgccccaca cccaccaata cctaaatctg ttaaggaaga cagaaaatgt | |
| 2701 | tttctttgtg ctcattgagt agttccagac agaagaagaa tatactcttt aaaatgtatt | |
| 2761 | tacctgttag ttggaagtac ccagaattat cagaaacgaa tgcaaaaaaa aaaaaaaaaa | |
| 2821 | aaaaaagctt acacagcttc ttagcaattt tttttttttt tgccgaaaca ataaattgcc | |
| 2881 | tttagcagca gtttaaaatc ctatcgtgaa caacctatat tttcgccatt ttacaatgga | |
| 2941 | gagttgtgac aagtacaggt tatcaagttt gcacttaact atgccaaaaa aagtttgaag | |
| 3001 | cgctctattc tcagacatgc tgtattatta cttctcattc aagattgaaa aatataaagg | |
| 3061 | tatccaaact ctgtcttaat gtaaatgtaa ctatttttcc ttcaagtgtt gactagggag | |
| 3121 | tcggtttctc tcttaaagac actcactgta caactgaaag cagctgtcat atttctggca | |
| 3181 | aaatgtgttt acgtatctga caagttgtac atttgtgtat gaactgacat aaaatgtgaa | |
| 3241 | agcctgtaag tgtacatgta gtggtgtggt gttctgtcta gaggatacaa ctgaatgttt | |
| 3301 | ttaatttgct gacttacaga cacaggctgt ttacaaaatg ctagctggaa agtctgtaat | |
| 3361 | gttcatgtca taacttttag ttaattgcca ttgagcacct gttctgagga ggtgagatgt | |
| 3421 | ggacttgtgc ttataaactg gagagtttag tcataatccc tcctggcttt gtgtgaatag | |
| 3481 | cttgctcact ttgctggcct ttgaaatgtg ttctccgtga taagctatcc atgtgtttgt | |
| 3541 | gataagagtg cttgtcaacc atgaccatct ttgagccttc ctagtcctcc acctggcaca | |
| 3601 | gtatttgaaa tggcaaagga tgtgcttcat cctctaacaa acagtgtaca ctcccagagc | |
| 3661 | tgatattctg gattgtgact gtgcacattt cctctagttc atgtctgtag tccctataga | |
| 3721 | atgatctgta ataaaatagt atactggact gtgcatcaaa gggatgtaaa attacagtat | |
| 3781 | tccaaaggtt gaagttctgc tgttttgtta taatgcctga tacacatctt gaataaagtc | |
| 3841 | ttaacatttt tctttt | |
| 1 | miyaivihil sllvgcfypa fasykilksq ncsvndlrgw liywiaygvy vafdyftagl | (SEQ ID NO:206) |
| 61 | lafipllsef kvlllfwmlp svgggseviy eeflrsfscn esfdqvlgri tlewgelvwq | |
| 121 | qvcsvlshlm vladryllps ghrpalqitp siedlvndai akrqleekrk qmgnlsdtin | |
| 181 | evlgenidln mdllhgsesd llvikepisk pkerpipppk pmrqpsssnq qemnlssqfm | |
| 241 | | |

[0628] Putative function
[0629] (CG1558)—unknown
[0630] (CG11697)—may be deleted in human cancers, possibly a receptor.

### Example 19

### Corkscrew/Shp2 (Category 3)

[0631] Corkscrew (CG3954) as a candidate gene is detected in a screen of a P-element insertion library covering the X chromosome of Drosophila melanogaster (Peter et al. 2001) as mutant phenotype in fly line 171, as described above.

[0632] Mitotic defects are observed in brain squashes: low mitotic index, few cells in mitosis and metaphases with separated chromosomes, and is placed in Category 3 as described above.

[0633] Rescue and sequencing of genomic DNA flanking the P-element insertion site indicates that the P-element is inserted into the 5′ region of two genes: CG3954 corkscrew and CG16903 cyclin/non-specific RNA polymersae II transcription factor.

[0634] Line ID—171

[0635] Phenotype—Lethal phase larval stage 1-2. Low mitotic index, few cells in mitosis, metaphase with separated chromosomes

[0636] Annotated Drosophila genome genomic segment containing P element insertion site (and map position)—AE003423 (2D1-2)

[0637] P element insertion site—42,253

[0638] Annotated Drosophila genome Complete Genome candidate
[0639] 2 candidates: CG3954—corkscrew. Protein tyrosine phosphatase required for cell signaling in eye development (2 splice variants) and CG16903—cyclin/non-specific RNA polymersae II transcription factor

[0640] CG3954—Corkscrew. Protein Tyrosine Phosphatase Required for cell Signaling in Eye Splice Variant 1

(SEQ ID NO:207)

ATGCTGTTCAACAAATGTCTGGAAAAGTTGTCCAGCTCGCTGGGCAATGT
GGTCAATCACAAGCTGCAAGAGAAACAAGTCTACAACAACAACAATATCA
ACAATAACAATAACAATACGCTAAACAACAACAATGCCTACAACAATCAG
CGAAACTTTGAGTACGAAAGAGCCATACAGGCGCACTACGGAAGCAAGGG
AAGACGCTCGGAGGAGCGCGAAAGGAGCGGCAAGTTCAAGGCCAGCAAGG
GTCGGAAAGCAAAGGTCACCCCACCAACGGAGACACCCGAGGCCCAGGAG
CCGGCCTGCAAGAACTGTATGACCCACGACGAGCTGGCCCAGATCATAAA
GGGCGTGGCCAAGGGCGCTGACGCGCAACGTAATCGAGACAACCGACTGC
AGCGCAGACGTCGTCCTCTCTCCGCCCAACCCTCCGCCGCTGCCTCCGCC
TCCACATCGACGGAATCTCTGCACCGTCTTACACCCAGCCCGCAGGCTTC
CTACCCGGCCACGCCCACCTCCTGGACAGCCACACCGCCCCAGTTCCCAG
CCGCCTTCGGCGGCGCCAGCTGCTCCAACAGCACACTGTCCCTCTTGGCC
ACCATGCGCGTCCAGCTCCATGGTTACACATGGTTTCATGGCAATCTTTC
CGGAAAGGAAGCGGAAAAATTGATCCTGGAGCGGGGCAAGAATGGTTCGT
TTCTCGTCCGTGAATCTCAGAGCAAGCCTGGCGACTTCGTCCTTTCCGTG
CGCACGGACGACAAAGTAACGCATGTCATGATTCGATGGCAGGACAAGAA
GTACGACGTCGGCGGCGGGGAATCCTTTGGCACCTTGTCGGAACTGATCG
ATCACTACAAGCGTAATCCCATGGTGGAGACGTGCGGAACCGTGGTGCAT
CTGCGACAGCCATTCAACGCCACACGAATCACGGCGGCCGGCATCAATGC
CCGGGTGGAACAGCTGGTCAAGGGAGGTTTCTGGGAGGAATTCGAATCGC
TGCAACAGGACAGTCGGGACACATTCTCGCGCAACGAGGGCTACAAACAG
GAGAACCGCCTCAAGAATCGCTACCGCAACATATTGCCATACGACCACAC
GCGCGTCAAGCTGCTGGACGTGGAGCATAGCGTGGCCGGAGCCGAGTACA
TCAATGCCAACTACATACGGCTGCCCACCGACGGCGACCTGTACAACATG
AGCAGCTCGTCGGAGAGCCTGAACAGCTCGGTGCCCTCGTGCCCCGCCTG
CACGGCTGCCCAGACACAGCGGAACTGCTCCAACTGCCAGCTGCAAAACA
AGACGTGCGTGCAGTGCGCCGTGAAGAGCGCCATTCTGCCGTATAGCAAC
TGTGCCACCTGCAGCCGCAAGTCAGACTCCCTGAGCAAGCACAAGCGGAG
CGAATCCTCGGCCTCTTCATCGCCCTCCTCCGGCTCTGGGTCCGGACCAG
GATCGTCGGGCACCAGCGGAGTGAGCAGCGTCAATGGACCCGGCACACCC
ACCAATCTCACGAGCGGCACAGCCGGATGTCTGGTCGGCCTGCTGAAGAG
ACACTCGAACGACTCGTCCGGAGCTGTTTCTATATCGATGGCCGAACGGG
AACGCGAGAGGGAGCGCGAGATGTTTAAGACCTACATCGCCACCCAGGGC
TGTCTGCTCACCCAGCAAGTGAACACGGTGACGGACTTCTGGAACATGGT
CTGGCAGGAGAACACGCGGGTGATCGTCATGACCACCAAGGAGTACGAGC
GCGGCAAAGAAAAGTGCGCCCGCTACTGGCCGGACGAGGGTAGATCGGAG
CAGTTCGGCCACGCGCGGATACAGTGCGTCTCGGAGAACTCGACCAGTGA
CTATACGCTGCGCGAGTTCCTCGTCTCGTGGCGGGATCAGCCGGCGCGCC
GGATCTTTCACTACCATTTCCAGGTGTGGCCGGATCACGGAGTGCCCGCC
GATCCGGGCTGTGTGCTCAACTTCCTGCAAGATGTCAACACGCGTCAGAG
TCACCTGGCTCAAGCGGGCGAGAAGCCGGGTCCGATCTGCGTGCACTGCT
CTGCGGGCATCGGTCGCACTGGCACCTTTATTGTGATCGATATGATTCTC
GATCAGATTGTGCGCAATGGATTGGATACTGAAATCGACATCCAGCGCAC
CATTCAGATGGTCCGATCGCAGCGTTCCGGTCTTGTGCAAACCGAGGCGC
AATACAAGTTCGTCTACTATGCGGTGCAGCACTATATACAGACCCTGATC
GCCCGGAAACGAGCTGAGGAGCAGAGCCTGCAGGTTGGCCGCGAGTACAC
CAATATAAAGTACACGGGCGAAATTGGAAACGATTCACAAAGATCTCCAT
TACCACCAGCAATTTCTAGCATAAGTTTAGTTCCGAGTAAGACGCCACTG
ACGCCGACATCGGCGGATTTGGGCACTGGGATGGGCCTAAGCATGGGCGT
GGGCATGGGCGTCGGCAACAAGCACGCATCGAAGCAGCAGCCGCCGTTGC
CGGTGGTCAACTGCAACAATAATAACAACGGCATTGGCAATAGCGGCTGC
AGCAACGGCGGCGGGAGCAGCACCACCAGCAGCAGCAACGGCAGCAGCAA
CGGTAACATCAACGCCCTACTGGGCGGCATCGGCTTGGGGCTGGGCGGCA
ATATGCGCAAGTCGAACTTTTACAGCGACTCGCTGAAGCAGCAACAGCAG
CGCGAGGAGCAGGCTCCGGCGGGAGCAGGTAAGATGCAGCAGCCGGCGCC
GCCGCTGCGACCGCGTCCTGGAATACTCAAGTTGCTCACCAGTCCCGTCA
TCTTTCAGCAAAATTCAAAAACATTCCCAAAGACATGA

(SEQ ID NO:208)

MLFNKCLEKLSSSLGNVVNHKLQEKQVYNNNNINNNNNNTLNNNNAYNNQ
RNFEYERAIQAHYGSKGRRSEERERSGKFKASKGRKAKVTPPTETPEAQE
PACKNCMTHDELAQIIKGVAKGADAQRNRDNRLQRRRRPLSAQPSAAASA
STSTESLHRLTPSPQASYPATPTSWTATPPQFPAAFGGASCSNSTLSLLA
TMRVQLHGYTWFHGNLSGKEAEKLILERGKNGSFLVRESQSKPGDFVLSV
RTDDKVTHVMIRWQDKKYDVGGGESFGTLSELIDHYKRNPMVETCGTVVH
LRQPFNATRITAAGINARVEQLVKGGFWEEFESLQQDSRDTFSRNEGYKQ
ENRLKNRYRNILPYDHTRVKLLDVEHSVAGAEYINANYIRLPTDGDLYNM
SSSSESLNSSVPSCPACTAAQTQRNCSNCQLQNKTCVQCAVKSAILPYSN
CATCSRKSDSLSKHKRSESSASSSPSSGSGSGPGSSGTSGVSSVNGPGTP
TNLTSGTAGCLVGLLKRHSNDSSGAVSISMAEREREREREMFKTYIATQG
CLLTQQVNTVTDFWNMVWQENTRVIVMTTKEYERGKEKCARYWPDEGRSE
QFGHARIQCVSENSTSDYTLREFLVSWRDQPARRIFHYHFQVWPDHGVPA
DPGCVLNFLQDVNTRQSHLAQAGEKPGPICVHCSAGIGRTGTFIVIDMIL
DQIVRNGLDTEIDIQRTIQMVRSQRSGLVQTEAQYKFVYYAVQHYIQTLI
ARKRAEEQSLQVGREYTNIKYTGEIGNDSQRSPLPPAISSISLVPSKTPL
TPTSADLGTGMGLSMGVGMGVGNKHASKQQPPLPVVNCNNNNNGIGNSGC
SNGGGSSTTSSSNGSSNGNINALLGGIGLGLGGNMRKSNFYSDSLKQQQQ
REEQAPAGAGKMQQPAPPLRPRPGILKLLTSPVIFQQNSKTFPKT

[0641] CG3954—Corkscrew. Protein Tyrosine Phosphatase Required for Cell Signaling in Eye Splice Variant 2

(SEQ ID NO:209)

AGTAAAAAAATAGTTTTTTTTTTGTATCCAACCAACCAACTGTAAAAATA
AGTTTAAACAAAGCATCTACTCATAAGTTTCATTTTTTTCCGTTAAGTGT
CAACATTATTTATTTTTTAAGTGTGCATTCAATAAGAAAATGTCATCGCG
AAGATGGTTCCACCCAACGATATCTGGCATCGAAGCTGAGAAACTGCTGC
AGGAGCAGGGATTCGACGGCTCCTTCCTCGCCCGCCTCTCCTCCTCGAAT
CCGGGCGCCTTCACGCTCTCCGTGCGCCGCGGCAACGAGGTGACCCACAT
CAAAATCCAAAACAATGGCGACTTCTTTGATCTCTACGGTGGTGAAAAGT
TCGCCACACTGCCGGAACTGGTACAATACTACATGGAGAATGGCGAGCTA
AAGGAGAAGAACGGCCAGGCCATCGAACTCAAGCAGCCGCTGATCTGCGC
CGAGCCCACCACGGAAAGATGGTTTCATGGCAATCTTTCCGGAAAGGAAG
CGGAAAAATTGATCCTGGAGCGGGGCAAGAATGGTTCGTTTCTCGTCCGT
GAATCTCAGAGCAAGCCTGGCGACTTCGTCCTTTCCGTGCGCACGGACGA
CAAAGTAACGCATGTCATGATTCGATGGCAGGACAAGAAGTACGACGTCG
GCGGGGGGGAATCCTTTGGCACCTTGTCGGAACTGATCGATCACTACAAG
CGTAATCCCATGGTGGAGACGTGCGGAACCGTGGTGCATCTGCGACAGCC
ATTCAACGCCACACGAATCACGGCGGCCGGCATCAATGCCCGGGTGGAAC
AGCTGGTCAAGGGAGGTTTCTGGGAGGAATTCGAATCGCTGCAACAGGAC
AGTCGGGACACATTCTCGCGCAACGAGGGCTACAAACAGGAGAACCGCCT
CAAGAATCGCTACCGCAACATATTGCCATACGACCACACGCGCGTCAAGC
TGCTGGACGTGGAGCATAGCGTGGCCGGAGCCGAGTACATCAATGCCAAC
TACATACGGCTGCCCACCGACGGCGACCTGTACAACATGAGCAGCTCGTC
GGAGAGCCTGAACAGCTCGGTGCCCTCGTGCCCCGCCTGCACGGCTGCCC
AGACACAGCGGAACTGCTCCAACTGCCAGCTGCAAAACAAGACGTGCGTG
CAGTGCGCCGTGAAGAGCGCCATTCTGCCGTATAGCAACTGTGCCACCTG
CAGCCGCAAGTCAGACTCCCTGAGCAAGCACAAGCGGAGCGAATCCTCGG
CCTCTTCATCGCCCTCCTCCGGCTCTGGGTCCGGACCAGGATCGTCGGGC
ACCAGCGGAGTGAGCAGCGTCAATGGACCCGGCACACCCACCAATCTCAC
GAGCGGCACAGCCGGATGTCTGGTCGGCCTGCTGAAGAGACACTCGAACG
ACTCGTCCGGAGCTGTTTCTATATCGATGGCCGAACGGGAACGCGAGAGG
GAGCGCGAGATGTTTAAGACCTACATCGCCACCCAGGGCTGTCTGCTCAC
CCAGCAAGTGAACACGGTGACGGACTTCTGGAACATGGTCTGGCAGGAGA
ACACGCGGGTGATCGTCATGACCACCAAGGAGTACGAGCGCGGCAAAGAA
AAGTGCGCCCGCTACTGGCCGGACGAGGGTAGATCGGAGCAGTTCGGCCA
CGCGCGGATACAGTGCGTCTCGGAGAACTCGACCAGTGACTATACGCTGC
GCGAGTTCCTCGTCTCGTGGCGGGATCAGCCGGCGCGCCGGATCTTTCAC
TACCATTTCCAGGTGTGGCCGGATCACGGAGTGCCCGCCGATCCGGGCTG
TGTGCTCAACTTCCTGCAAGATGTCAACACGCGTCAGAGTCACCTGGCTC
AAGCGGGCGAGAAGCCGGGTCCGATCTGCGTGCACTGCTCTGCGGGCATC
GGTCGCACTGGCACCTTTATTGTGATCGATATGATTCTCGATCAGATTGT
GCGCAATGGATTGGATACTGAAATCGACATCCAGCGCACCATTCAGATGG
TCCGATCGCAGCGTTCCGGTCTTGTGCAAACCGAGGCGCAATACAAGTTC
GTCTACTATGCGGTGCAGCACTATATACAGACCCTGATCGCCCGGAAACG
AGCTGAGGAGCAGAGCCTGCAGGTTGGCCGCGAGTACACCAATATAAAGT
ACACGGGCGAAATTGGAAACGATTCACAAAGATCTCCATTACCACCAGCA
ATTTCTAGCATAAGTTTAGTTCCGAGTAAGACGCCACTGACGCCGACATC
GGCGGATTTGGGCACTGGGATGGGCCTAAGCATGGGCGTGGGCATGGGCG
TCGGCAACAAGCACGCATCGAAGCAGCAGCCGCCGTTGCCGGTGGTCAAC
TGCAACAATAATAACAACGGCATTGGCAATAGCGGCTGCAGCAACGGCGG
CGGGAGCAGCACCACCAGCAGCAGCAACGGCAGCAGCAACGGTAACATCA
ACGCCCTACTGGGCGGCATCGGCTTGGGGCTGGGCGGCAATATGCGCAAG
TCGAACTTTTACAGCGACTCGCTGAAGCAGCAACAGCAGCGCGAGGAGCA
GGCTCCGGCGGGAGCAGGTAAGATGCAGCAGCCGGCGCCGCCGCTGCGAC
CGCGTCCTGGAATACTCAAGTTGCTCACCAGTCCCGTCATCTTTCAGCAA
AATTCAAAAACATTCCCAAAGACATGA

(SEQ ID NO:210)

MSSRRWFHPTISGIEAEKLLQEQGFDGSFLARLSSSNPGAFTLSVRRGNE
VTHIKIQNNGDFFDLYGGEKFATLPELVQYYMENGELKEKNGQAIELKQP
LICAEPTTERWFHGNLSGKEAEKLILERGKNGSFLVRESQSKPGDFVLSV
RTDDKVTHVMIRWQDKKYDVGGGESFGTLSELIDHYKRNPMVETCGTVVH
LRQPFNATRITAAGINARVEQLVKGGFWEEFESLQQDSRDTFSRNEGYKQ
ENRLKNRYRNILPYDHTRVKLLDVEHSVAGAEYINANYIRLPTDGDLYNM
SSSSESLNSSVPSCPACTAAQTQRNCSNCQLQNKTCVQCAVKSAILPYSN
CATCSRKSDSLSKHKRSESSASSSPSSGSGSGPGSSGTSGVSSVNGPGTP
TNLTSGTAGCLVGLLKRHSNDSSGAVSISMAEREREREREMFKTYIATQG
CLLTQQVNTVTDFWNMVWQENTRVIVMTTKEYERGKEKCARYWPDEGRSE
QFGHARIQCVSENSTSDYTLREFLVSWRDQPARRIFHYHFQVWPDHGVPA
DPGCVLNFLQDVNTRQSHLAQAGEKPGPICVHCSAGIGRTGTFIVIDMIL
DQIVRNGLDTEIDIQRTIQMVRSQRSGLVQTEAQYKFVYYAVQHYIQTLI
ARKRAEEQSLQVGREYTNIKYTGEIGNDSQRSPLPPAISSISLVPSKTPL
TPTSADLGTGMGLSMGVGMGVGNKHASKQQPPLPVVNCNNNNNGIGNSGC
SNGGGSSTTSSSNGSSNGNINALLGGIGLGLGGNMRKSNFYSDSLKQQQQ
REEQAPAGAGKMQQPAPPLRPRPGILKLLTSPVIFQQNSKTFPKT

[0642] CG16903-Cyclin/Non-Specific RNA Polymersae II Transcription Factor

(SEQ ID NO:211)

ATTTAGTATAAAAGCACGCCTGTTATCGGCTAAATTTACAAAAAAAAAGG
GAAAATTAAAAAATTAAAACACTTAAATAAACGCTTTCCTGGGTTAACCG
CGCACGAATGGCCACCCGTGGGGCCGGCTCGACTGTGGTCCACACGACGG
TGACAGCGCTGACGGTGGAGACGATCACCAATGTCCTGACCACGGTGACT
TCGTTCCATTCGAACAGCGTCAACATTTCGAACAACAACAGCAGCAGTGG
AGCGGCCCCGGGGGCGGATGCAGCTGGCGGCGATGCAGGGGGCGTGGCAG
CGGCTCAGGCGGACGCCAACAAGCCTATCTATCCTCGGCTCTTTAACCGC
ATCGTGCTGACGCTGGAGAACAGCCTCATTCCGGAGGGCAAAATCGATGT
GACGCCATCCAGCCAGGATGGACTGGACCATGAGACGGAGAAGGACCTGC
GCATACTGGGCTGCGAGCTTATTCAGACAGCCGGAATTTTGCTGCGCTTG
CCGCAGGTTGCCATGGCCACCGGCCAGGTGCTGTTCCAGCGCTTCTTCTA
CTCGAAGAGCTTTGTGCGGCACAACATGGAGACTGTGGCCATGAGCTGCG
TGTGCCTGGCGTCCAAGATCGAGGAGGCGCCGCGCCGCATTAGAGACGTG
ATCAATGTGTTCCATCACATCAAGCAAGTGCGGGCCCAAAAGGAAATCTC
GCCCATGGTGCTAGATCCTTACTACACGAACCTCAAGATGCAGGTGATCA
AGGCCGAGCGGCGCGTCCTCAAGGAACTGGGCTTCTGTGTACACGTGAAG
CATCCGCACAAGCTGATCGTGATGTATCTGCAGGTGCTTCAGTACGAGAA
GCACGAGAAGCTGATGCAGCTCTCCTGGAACTTCATGAATGACTCGCTGA
GGACGGACGTTTTTATGCGCTACACACCAGAGGCGATTGCATGCGCCTGC
ATCTACCTGAGTGCCCGCAAGCTCAACATACCTCTGCCCAACAGCCCGCC
GTGGTTCGGCATTTTTCGGGTGCCCATGGCGGACATTACGGATATCTGCT
ACCGTGTGATGGAGCTGTACATGCGTTCCAAGCCGGTGGTGGAGAAACTG
GAGGCGGCCGTGGACGAGCTGAAAAAGCGGTACATTGATGCGCGCAACAA
AACGAAGGAGGCAAACACACCGCCGGCTGTAATCACCGTGGATCGGAACA
ATGGCTCGCACAATGCGTGGGGTGGCTTCATCCAGCGTGCTATCCCACTG
CCCTTGCCATCGGAAAAGTCGCCGCAAAAGGATTCGAGGTCACGCTCGCG
ATCCAGGACGCGCACCCATTCGCGGACACCTCGCTCCCGATCACCCAGGT
CCAGGTCGCCTAGTCGCGAGCGCACTAAGAAGACCCACCGCAGTCGATCC
TCCCGCTCGCGCTCCCGTTCGCCGCCGAAGCATAAGAAAAAGTCACGTCA
CTACTCGAGGTCGCCCACGCGCTCCAATTCGCCGCACAGCAAGCACAGGA
AGTCGAAATCCTCGCGAGAACGCTCTGAATACTACTCCAAGAAAGATCGG
TCTGGAAACCCAGGCAGTAGCAATAATCTAGGTGATGGCGACAAGTATCG
CAACTCCGTCTCCAATTCCGGCAAGCACAGTCGGTACTCCTCCTCCTCGT
CGCGTCGGAACAGCGGTGGTGGTGGAGACGGAAGAAGCGGAGGAGGAGGT
GGTGGCGGCGGTGGAGGCAACGGGAACCACGGCAGCCGAGGGGGGCACAA
GCATCGGGATGGCGATCGCTCCAGGGATCGCAAGCGCTAGTGATTGATAG
ACAAGCGAGACAAACACTCCCTTATATTTAATTGCTCTTTATTTTACAAA
TTTACAGATTATTTCTACCGATTTAGTAATGCTAATGTGTATTGAAAAAA
CGAACGCGGGTAAACAATAAATGTAACTCTTCAATC

(SEQ ID NO:212)

MATRGAGSTVVHTTVTALTVETITNVLTTVTSFHSNSVNISNNNSSSGAA
PGADAAGGDAGGVAAAQADANKPIYPRLFNRIVLTLENSLIPEGKIDVTP
SSQDGLDHETEKDLRILGCELIQTAGILLRLPQVAMATGQVLFQRFFYSK
SFVRHNMETVAMSCVCLASKIEEAPRRIRDVINVFHHIKQVRAQKEISPM
VLDPYYTNLKMQVIKAERRVLKELGFCVHVKHPHKLIVMYLQVLQYEKHE
KLMQLSWNFMNDSLRTDVFMRYTPEAIACACIYLSARKLNIPLPNSPPWF
GIFRVPMADITDICYRVMELYMRSKPVVEKLEAAVDELKKRYIDARNKTK
EANTPPAVITVDRNNGSHNAWGGFIQRAIPLPLPSEKSPQKDSRSRSRSR
TRTHSRTPRSRSPRSRSPSRERTKKTHRSRSSRSRSRSPPKHKKKSRHYS
RSPTRSNSPHSKHRKSKSSRERSEYYSKKDRSGNPGSSNNLGDGDKYRNS
VSNSGKHSRYSSSSSRRNSGGGGDGRSGGGGGGGGGGNGNHGSRGGHKHR
DGDRSRDRKLR

[0643] Human homologue of Complete Genome candidate
[0644] CG3954 homologue is Homo sapiens protein tyrosine phosphatase, non-receptor type 11 (PTPN11), also known as Shp2. Shp2 has 2 alternative transcripts having accession numbers NM_{—}002834 and NM_{—}080601.

[0645] NM 002834 Homo Sapiens Protein Tyvrosine Phosphatase, Non-Receptor Type 11 (PTPN11), Transcript Variant 1, mRNA also known as Shp2.

| | | | | | | | |
|---|---|---|---|---|---|---|---|
| 1 | cggccgcggt | ttccaggagg | aagcaaggat | gctttggaca | ctgtgcgtgg | cgcctccgcg | (SEQ ID NO:213) |
| 61 | gagcccccgc | gctgccattc | ccggccgtcg | ctcggtcctc | cgctgacggg | aagcaggaag | |
| 121 | tggcggcggg | cgtcgcgagc | ggtgacatca | cgggggcgac | ggcggcgaag | ggcgggggcg | |
| 181 | gaggaggagc | gagccgggcc | ggggggcagc | tgcacagtct | ccgggatccc | caggcctgga | |
| 241 | ggggggtctg | tgcgcggccg | gctggctctg | ccccgcgtcc | ggtcccgagc | gggcctccct | |
| 301 | cgggccagcc | cgatgtgacc | gagcccagcg | gagcctgagc | aaggagcggg | tccgtcgcgg | |
| 361 | agccggaggg | cgggaggaac | atgacatcgc | ggagatggtt | tcacccaaat | atcactggtg | |
| 421 | tggaggcaga | aaacctactg | ttgacaagag | gagttgatgg | cagttttttg | gcaaggccta | |
| 481 | gtaaaagtaa | ccctggagac | ttcacacttt | ccgttagaag | aaatggagct | gtcacccaca | |
| 541 | tcaagattca | gaacactggt | gattactatg | acctgtatgg | aggggagaaa | tttgccactt | |
| 601 | tggctgagtt | ggtccagtat | tacatggaac | atcacgggca | attaaaagag | aagaatggag | |
| 661 | atgtcattga | gcttaaatat | cctctgaact | gtgcagatcc | tacctctgaa | aggtggtttc | |
| 721 | atggacatct | ctctgggaaa | gaagcagaga | aattattaac | tgaaaaagga | aaacatggta | |
| 781 | gttttcttgt | acgagagagc | cagagccacc | ctggagattt | tgttctttct | gtgcgcactg | |
| 841 | gtgatgacaa | aggggagagc | aatgacggca | agtctaaagt | gacccatgtt | atgattcgct | |
| 901 | gtcaggaact | gaaatacgac | gttggtggag | gagaacggtt | tgattctttg | acagatcttg | |
| 961 | tggaacatta | taagaagaat | cctatggtgg | aaacattggg | tacagtacta | caactcaagc | |
| 1021 | agccccttaa | cacgactcgt | ataaatgctg | ctgaaataga | aagcagagtt | cgagaactaa | |
| 1081 | gcaaattagc | tgagaccaca | gataaagtca | aacaaggctt | ttgggaagaa | tttgagacac | |
| 1141 | tacaacaaca | ggagtgcaaa | cttctctaca | gccgaaaaga | gggtcaaagg | caagaaaaca | |
| 1201 | aaaacaaaaa | tagatataaa | aacatcctgc | cctttgatca | taccagggtt | gtcctacacg | |
| 1261 | atggtgatcc | caatgagcct | gtttcagatt | acatcaatgc | aaatatcatc | atgcctgaat | |
| 1321 | ttgaaaccaa | gtgcaacaat | tcaaagccca | aaaagagtta | cattgccaca | caaggctgcc | |
| 1381 | tgcaaaacac | ggtgaatgac | ttttggcgga | tggtgttcca | agaaaactcc | cgagtgattg | |
| 1441 | tcatgacaac | gaaagaagtg | gagagaggaa | agagtaaatg | tgtcaaatac | tggcctgatg | |
| 1501 | agtatgctct | aaaagaatat | ggcgtcatgc | gtgttaggaa | cgtcaaagaa | agcgccgctc | |
| 1561 | atgactatac | gctaagagaa | cttaaacttt | caaaggttgg | acaagggaat | acggagagaa | |
| 1621 | cggtctggca | ataccacttt | cggacctggc | cggaccacgg | cgtgcccagc | gaccctgggg | |
| 1681 | gcgtgctgga | cttcctggag | gaggtgcacc | ataagcagga | gagcatcatg | gatgcagggc | |
| 1741 | cggtcgtggt | gcactgcagt | gctggaattg | gccggacagg | gacgttcatt | gtgattgata | |
| 1801 | ttcttattga | catcatcaga | gagaaaggtg | ttgactgcga | tattgacgtt | cccaaaacca | |
| 1861 | tccagatggt | gcggtctcag | aggtcaggga | tggtccagac | agaagcacag | taccgattta | |
| 1921 | tctatatggc | ggtccagcat | tatattgaaa | cactacagcg | caggattgaa | gaagagcaga | |
| 1981 | aaagaaagag | gaaagggcac | gaatatacaa | atattaagta | ttctctagcg | gaccagacga | |
| 2041 | gtggagatca | gagccctctc | ccgccttgta | ctccaacgcc | accctgtgca | gaaatgagag | |
| 2101 | aagacagtgc | tagagtctat | gaaaacgtgg | gcctgatgca | acagcagaaa | agtttcagat | |
| 2161 | gagaaaacct | gccaaaactt | cagcacagaa | atagatgtgg | actttcaccc | tctccctaaa | |
| 2221 | aagatcaaga | acagacgcaa | gaaagtttat | gtgaagacag | aatttggatt | tggaaggctt | |
| 2281 | gcaatgtggt | tgactacctt | ttgataagca | aaatttgaaa | ccatttaaag | accactgtat | |
| 2341 | tttaactcaa | caatacctgc | ttcccaatta | ctcatttcct | cagataagaa | gaaatcatct | |
| 2401 | ctacaatgta | gacaacatta | tattttatag | aatttgtttg | aaattgagga | agcagttaaa | |
| 2461 | ttgtgcgctg | tattttgcag | attatgggga | ttcaaattct | agtaataggc | ttttttattt | |
| 2521 | ttatttttat | acccttaacc | agtttaattt | tttttttcct | cattgttggg | gatgatgaga | |
| 2581 | agaaatgatt | tgggaaaatt | aagtaacaac | gacctagaaa | agtgagaaca | atctcattta | |
| 2641 | ccatcatgta | tccagtagtg | gataattcat | tttgatggct | tctatttttg | gccaaatgag | |
| 2701 | aattaagcca | gtgcctgaga | ctgtcagaag | ttgacctttg | cactggcatt | aaagagtcat | |
| 2761 | agaaaaaa | | | | | | |

| | |
|---|---|
| MTSRRWFHPNITGVEAENLLLTRGVDGSFLARPSKSNPGDFTLS | (SEQ ID NO:214) |
| VRRNGAVTHIKIQNTGDYYDLYGGEKFATLAELVQYYMEHHGQLKEKNGDVIELKYPL | |
| NCADPTSERWFHGHLSGKEAEKLLTEKGKHGSFLVRESQSHPGDFVLSVRTGDDKGES | |
| NDGKSKVTHVMIRCQELKYDVGGGERFDSLTDLVEHYKKNPMVETLGTVLQLKQPLNT | |
| TRINAAEIESRVRELSKLAETTDKVKQGFWEEFETLQQQECKLLYSRKEGQRQENKNK | |
| NRYKNILPFDHTRVVLHDGDPNEPVSDYINANIIMPEFETKCNNSKPKKSYIATQGCL | |
| QNTVNDFWRMVFQENSRVIVMTTKEVERGKSKCVKYWPDEYALKEYGVMRVRNVKESA | |
| AHDYTLRELKLSKVGQGNTERTVWQYHFRTWPDHGVPSDPGGVLDFLEEVHHKQESIM | |
| DAGPVVVHCSAGIGRTGTFIVIDILIDIIREKGVDCDIDVPKTIQMVRSQRSGMVQTE | |
| AQYRFIYMAVQHYIETLQRRIEEEQKRKRKGHEYTNIKYSLADQTSGDQSPLPPCTPT | |
| PPCAEMREDSARVYENVGLMQQQKSFR | |

[0646] NM_{—}080601 Homo Sapiens Protein Tyrosine Phosphatase, Non-Receptor Type 11(PTPN11), Transcript Variant 2, mRNA (Version 1)

| | | |
|---|---|---|
| 1 | gcggaggagg agcgagccgg gccggggggc agctgcacag tctccgggat ccccaggcct | (SEQ ID NO:215) |
| 61 | ggaggggggt ctgtgcgcgg ccggctggct ctgccccgcg tccggtcccg agcgggcctc | |
| 121 | cctcgggcca gcccgatgtg accgagccca gcggagcctg agcaaggagc gggtccgtcg | |
| 181 | cggagccgga gggcgggagg aacatgacat cgcggagatg gtttcaccca aatatcactg | |
| 241 | gtgtggaggc agaaaaccta ctgttgacaa gaggagttga tggcagtttt ttggcaaggc | |
| 301 | ctagtaaaag taaccctgga gacttcacac tttccgttag aagaaatgga gctgtcaccc | |
| 361 | acatcaagat tcagaacact ggtgattact atgacctgta tggaggggag aaatttgcca | |
| 421 | ctttggctga gttggtccag tattacatgg aacatcacgg gcaattaaaa gagaagaatg | |
| 481 | gagatgtcat tgagcttaaa tatcctctga actgtgcaga tcctacctct gaaaggtggt | |
| 541 | ttcatggaca tctctctggg aaagaagcag agaaattatt aactgaaaaa ggaaaacatg | |
| 601 | gtagttttct tgtacgagag agccagagcc accctggaga ttttgttctt tctgtgcgca | |
| 661 | ctggtgatga caaaggggag agcaatgacg gcaagtctaa agtgacccat gttatgattc | |
| 721 | gctgtcagga actgaaatac gacgttggtg gaggagaacg gtttgattct ttgacagatc | |
| 781 | ttgtggaaca ttataagaag aatcctatgg tggaaacatt gggtacagta ctacaactca | |
| 841 | agcagcccct taacacgact cgtataaatg ctgctgaaat agaaagcaga gttcgagaac | |
| 901 | taagcaaatt agctgagacc acagataaag tcaaacaagg cttttgggaa gaatttgaga | |
| 961 | cactacaaca acaggagtgc aaacttctct acagccgaaa agagggtcaa aggcaagaaa | |
| 1021 | acaaaaacaa aaatagatat aaaaacatcc tgccctttga tcataccagg gttgtcctac | |
| 1081 | acgatggtga tcccaatgag cctgtttcag attacatcaa tgcaaatatc atcatgcctg | |
| 1141 | aatttgaaac caagtgcaac aattcaaagc ccaaaaagag ttacattgcc acacaaggct | |
| 1201 | gcctgcaaaa cacggtgaat gacttttggc ggatggtgtt ccaagaaaac tcccgagtga | |
| 1261 | ttgtcatgac aacgaaagaa gtggagagag gaaagagtaa atgtgtcaaa tactggcctg | |
| 1321 | atgagtatgc tctaaaagaa tatggcgtca tgcgtgttag gaacgtcaaa gaaagcgccg | |
| 1381 | ctcatgacta tacgctaaga gaacttaaac tttcaaaggt tggacaaggg aatacggaga | |
| 1441 | gaacggtctg gcaataccac tttcggacct ggccggacca cggcgtgccc agcgaccctg | |
| 1501 | ggggcgtgct ggacttcctg gaggaggtgc accataagca ggagagcatc atggatgcag | |
| 1561 | ggccggtcgt ggtgcactgc aggtgacagc tcctgctgcc cctctaggcc acagcctgtc | |
| 1621 | cctgtctcct agcgcccagg gcttgctttt acctacccac tcctagctct ttaactgtag | |
| 1681 | gaagaattta atatctgttt gaggcataga gcaactgcat tgagggacat tttgatccca | |
| 1741 | aggcatattt ctcctagacc ctacagcact gccattggcc atggccatgg caacatgctc | |
| 1801 | agttaaaaca gcaaagacta agtcagcatt atctctgagt ccaccagaag ttgtgcatta | |
| 1861 | aacaacttca tcctggaaaa aaaaaaaaaa aa | |
| 1 | mtsrrwfhpn itgveaenll ltrgvdgsfl arpsksnpgd ftlsvrrnga vthikiqntg | (SEQ ID NO:216) |
| 61 | dyydlyggek fatlaelvqy ymehhgqlke kngdvielky plncadptse rwfhghlsgk | |
| 121 | eaeklltekg khgsflvres qshpgdfvls vrtgddkges ndgkskvthv mircqelkyd | |
| 181 | vgggerfdsl tdlvehykkn pmvetlgtvl qlkqplnttr inaaeiesrv relsklaett | |
| 241 | dkvkqgfwee fetlqqqeck llysrkegqr qenknknryk nilpfdhtrv vlhdgdpnep | |
| 301 | vsdyinanii mpefetkcnn skpkksyiat qgclqntvnd fwrmvfqens rvivmttkev | |
| 361 | ergkskcvky wpdeyalkey gvmrvrnvke saahdytlre lklskvgqgn tertvwqyhf | |
| 421 | rtwpdhgvps dpggvldfle evhhkqesim dagpvvvhcr | |

[0647] NM_{—}080601 Homo Sapiens Protein Tyrosine Phosphatase, Non-Receptor Type 11 (PTPN11), Transcript Variant 2, mRNA (Version 2)

| | | | | | | | |
|---|---|---|---|---|---|---|---|
| 1 | cggccgcggt | ttccaggagg | aagcaaggat | gctttggaca | ctgtgcgtgg | cgcctccgcg | (SEQ ID NO:217) |
| 61 | gagcccccgc | gctgccattc | ccggccgtcg | ctcggtcctc | cgctgacggg | aagcaggaag | |
| 121 | tggcggcggg | cgtcgcgagc | ggtgacatca | cgggggcgac | ggcggcgaag | ggcgggggcg | |
| 181 | gaggaggagc | gagccgggcc | ggggggcagc | tgcacagtct | ccgggatccc | caggcctgga | |
| 241 | ggggggtctg | tgcgcggccg | gctggctctg | ccccgcgtcc | ggtcccgagc | gggcctccct | |
| 301 | cgggccagcc | cgatgtgacc | gagcccagcg | gagcctgagc | aaggagcggg | tccgtcgcgg | |
| 361 | agccggaggg | cgggaggaac | atgacatcgc | ggagatggtt | tcacccaaat | atcactggtg | |
| 421 | tggaggcaga | aaacctactg | ttgacaagag | gagttgatgg | cagttttttg | gcaaggccta | |
| 481 | gtaaaagtaa | ccctggagac | ttcacacttt | ccgttagaag | aaatggagct | gtcacccaca | |
| 541 | tcaagattca | gaacactggt | gattactatg | acctgtatgg | aggggagaaa | tttgccactt | |
| 601 | tggctgagtt | ggtccagtat | tacatggaac | atcacgggca | attaaaagag | aagaatggag | |
| 661 | atgtcattga | gcttaaatat | cctctgaact | gtgcagatcc | tacctctgaa | aggtggtttc | |
| 721 | atggacatct | ctctgggaaa | gaagcagaga | aattattaac | tgaaaaagga | aaacatggta | |
| 781 | gttttcttgt | acgagagagc | cagagccacc | ctggagattt | tgttctttct | gtgcgcactg | |
| 841 | gtgatgacaa | aggggagagc | aatgacggca | agtctaaagt | gacccatgtt | atgattcgct | |
| 901 | gtcaggaact | gaaatacgac | gttggtggag | gagaacggtt | tgattctttg | acagatcttg | |
| 961 | tggaacatta | taagaagaat | cctatggtgg | aaacattggg | tacagtacta | caactcaagc | |
| 1021 | agccccttaa | cacgactcgt | ataaatgctg | ctgaaataga | aagcagagtt | cgagaactaa | |
| 1081 | gcaaattagc | tgagaccaca | gataaagtca | aacaaggctt | ttgggaagaa | tttgagacac | |
| 1141 | tacaacaaca | ggagtgcaaa | cttctctaca | gccgaaaaga | gggtcaaagg | caagaaaaca | |
| 1201 | aaaacaaaaa | tagatataaa | aacatcctgc | cctttgatca | taccagggtt | gtcctacacg | |
| 1261 | atggtgatcc | caatgagcct | gtttcagatt | acatcaatgc | aaatatcatc | atgcctgaat | |
| 1321 | ttgaaaccaa | gtgcaacaat | tcaaagccca | aaaagagtta | cattgccaca | caaggctgcc | |
| 1381 | tgcaaaacac | ggtgaatgac | ttttggcgga | tggtgttcca | agaaaactcc | cgagtgattg | |
| 1441 | tcatgacaac | gaaagaagtg | gagagaggaa | agagtaaatg | tgtcaaatac | tggcctgatg | |
| 1501 | agtatgctct | aaaagaatat | ggcgtcatgc | gtgttaggaa | cgtcaaagaa | agcgccgctc | |
| 1561 | atgactatac | gctaagagaa | cttaaacttt | caaaggttgg | acaagggaat | acggagagaa | |
| 1621 | cggtctggca | ataccacttt | cggacctggc | cggaccacgg | cgtgcccagc | gaccctgggg | |
| 1681 | gcgtgctgga | cttcctggag | gaggtgcacc | ataagcagga | gagcatcatg | gatgcagggc | |
| 1741 | cggtcgtggt | gcactgcagg | tgacagctcc | tgctgcccct | ctaggccaca | gcctgtccct | |
| 1801 | gtctcctagc | gcccagggct | tgcttttacc | tacccactcc | tagctcttta | actgtaggaa | |
| 1861 | gaatttaata | tctgtttgag | gcatagagca | actgcattga | gggacatttt | gatcccaagg | |
| 1921 | catatttctc | ctagacccta | cagcactgcc | attggccatg | gccatggcaa | catgctcagt | |
| 1981 | taaaacagca | aagactaagt | cagcattatc | tctgagtcca | ccagaagttg | tgcattaaac | |
| 2041 | aacttcatcc | tggaaaaaaa | aaaaaaaaa | | | | |

| | |
|---|---|
| MTSRRWFHPNITGVEAENLLLTRGVDGSFLARPSKSNPGDFTLS | (SEQ ID NO:218) |
| VRRNGAVTHIKIQNTGDYYDLYGGEKFATLAELVQYYMEHHGQLKEKNGDVIELKYPL | |
| NCADPTSERWFHGHLSGKEAEKLLTEKGKHGSFLVRESQSHPGDFVLSVRTGDDKGES | |
| NDGKSKVTHVMIRCQELKYDVGGGERFDSLTDLVEHYKKNPMVETLGTVLQLKQPLNT | |
| TRINAAEIESRVRELSKLAETTDKVKQGFWEEFETLQQQECKLLYSRKEGQRQENKNK | |
| NRYKNILPFDHTRVVLHDGDPNEPVSDYINANIIMPEFETKCNNSKPKKSYIATQGCL | |
| QNTVNDFWRMVFQENSRVIVMTTKEVERGKSKCVKYWPDEYALKEYGVMRVRNVKESA | |
| AHDYTLRELKLSKVGQGNTERTVWQYHFRTWPDHGVPSDPGGVLDFLEEVHHKQESIM | |
| DAGPVVVHCR | |

[0648] Putative function
[0649] (CG3954)—protein tyrosine phosphatase
[0650] (CG16903)—cyclin, potentially involved in differentiation and neural plasticity

### Example 19B

### Validation of GENE Function by RNA Interference (RNAi) Knockdown in Drosophila Cultured Cells

[0651] To confirm the mitotic role of the target protein, knockdown of Corkscrew (CG3954) expression is performed in cultured Drosophila Dmel -2 cells using a double stranded RNA (dsRNA) from within the Corkscrew (CG3954) CDS corresponding to the following CDS sequence:

| | |
|---|---|
| GCCGAGTACATCAATGCCAACTACATACGGCTGCCCACCGACGGCGACCTGTACAA | (SEQ ID NO:219) |
| CATGAGCAGCTCGTCGGAGAGCCTGAACAGCTCGGTGCCCTCGTGCCCCGCCTGCAC | |
| GGCTGCCCAGACACAGCGGAACTGCTCCAACTGCCAGCTGCAAAACAAGACGTGCG | |
| TGCAGTGCGCCGTGAAGAGCGCCATTCTGCCGTATAGCAACTGTGCCACCTGCAGCC | |
| GCAAGTCAGACTCCCTGAGCAAGCACAAGCGGAGCGAATCCTCGGCCTCTTCATCG | |
| CCCTCCTCCGGCTCTGGGTCCGGACCAGGATCGTCGGGCACCAGCGGAGTGAGCAG | |
| CGTCAATGGACCCGGCACACCCACCAATCTCACGAGCGGCACAGCCGGATGTCTGG | |
| TCGGCCTGCTGAAGAGACACTCGAACGACTCGTCCGGAGCTGTTTCTATATCGATGG | |
| CCGAACGGGAACGCGAGAGGGAGCGCGAGATGTTTAAGACCTACATCGCCACCCA | |

[0652] dsRNA is prepared by annealing complimentary RNAs made by in vitro transcription from a PCR fragment created with the following PCR primers:

(SEQ ID NO:220)

TAATACGACTCACTATAGGGAGAGCCGAGTACATCAATGCCAACTACAT

(SEQ ID NO:221)

TAATACGACTCACTATAGGGAGATGGGTGGCGATGTAGGTCTTAAACAT

Cells are transfected with double stranded RNA in the presence of ‘Transfast’ transfection reagent. A control transfection of a non-endogenous RNA corresponding to RFP (red fluorescent protein) is carried out in parallel.

[0653] Analysis of Corkscrew CG3954 Knockdown by RNAi in D-Mel2 Cells by Cellomics Mitotic Index Assay

[0654] For the transfection, 1 μg dsRNA is added to a well of a 96-well Packard viewplate and 35 μl of logarithmically growing DMe1-2 cells diluted to 2.3×10⁵ cells/ml in fresh Drosophila-SFM/glutamine/Pen-Strep are added. Cells are incubated with the dsRNA (60 nM) in a humid chamber at 28° C. for 1 hr before addition of 100 μl Drosophila-SFM/glutamine/Pen-Strep. Cells are incubated at 28° C. for 72 hours before analysis. For the assay, cells were fixed and stained using the Cellomics Mitotic Index HitKit following manufacturers instructions. The mitotic index of cells in each well was determined using the ArrayScan HCS System, running the Application protocol Mike_{—}250502_Polgen_MitoticIndex_{—}10×_p2.0 with the 10× objective and the DualBGlp filter set. This automated screening system detects the levels of a specific antigen (phosphorylated histone H3) which is only detectable during mitosis while the chromosomes are condensed.

[0655] Results for Corkscrew (CG3954) are shown in FIG. 1. A reproducible and significant reduction in mitotic index is observed in this assay indicating a reduction in the number of cells able to exit S-phase and enter mitosis after RNAi

[0656] Analysis of Corkscrew CG3954 Knockdown by RNAi in D-Mel2 Cells by Microscopy

[0657] For transfection 9 μl of Transfast reagent (Promega) is added to 3μg gene specific dsRNA in 500 μl Drosophila Schneiders medium (no additives) and incubated at room temperature for 15 min. For control wells an equivalent amount of RFP dsRNA is used. This mix is added to a well of a 6-well tissue culture plate containing a glass coverslip and 500 μl of a Dme1-2 cells at 1×10⁶ cells/ml in shneiders medium. After a 1 hour incubation at 28° C., 2 mls Schneiders medium+10% FCS and pen/strep solution is added and cells are incubated at 28° C. for 48 hours. Cells on the coverslip are fixed in formaldehyde and stained with antibodies which detect α-tubulin and γ-tubulin (centrosomes), and are co-stained with DAPI to detect DNA.

[0658] An increase in the number of cells with chromosomal defects (see Table 1 below) was observed upon RNAi. The phenotypes seen were aneuploidy (65% of mitoses compared to 30% in control cells), misaligned chromosomes (80% compared to 40% in control cells), and polyploidy, however no spindle defects were observed.

| | | | % of chromosomal |
|---|---|---|---|
| | Number cells with | Number of | defects |
| | chromosomal | cells with | (no defects/total |
| dsRNA | defects | normal mitosis | cells in mitosis) |
| No RNA | 135 | 314 | 39.47 |
| RFP | 137 | 309 | 40.29 |
| CG1725 | 186 | 87 | 68.13 |

[0659] Table 1 shows mitotic defects observed by microscopy after RNAi knockdown of Corkscrew (CG3954) in Dmel2 Drosophila cultured cells.

### Example 19C

### Shp2 is a Human Homologue of Drosophila Corkscrew CG3954

[0660] BLASTP with Drosophila Corkscrew CG3954 reveals 46% (327/700) sequence identity with the human Shp2 gene (genbank accession D13540), indicating that they are homologues. The BLASTP results are shown in FIG. 2.

[0661] The sequence of the human Shp2 gene MRNA (2 splice variants is shown in Example 19 above).

### Example 19D

### Validation of the Mitotic Role of the Human Homologue by siRNA Knockdown of Shp2 Expression in Human Cultured Cells

[0662] Generation of Shp2 siRNA Knockdowns

[0663] Knockdown of human Shp2 gene expression is achieved by siRNA (short interfering RNA, Elbashir et al, Nature 2001 May 24;411(6836):494-8). We used synthetic double stranded RNAs corresponding to two different regions of the Shp2 mRNA. siRNAs are obtained from Dhannacon (our supplier). The siRNA sequences are:

| | | | |
|---|---|---|---|
| COD1650 | shp2-1 | AACGUCAAAGAAAGCGC | Corresponds to nucleotides |
| | siRNA | CGCU | 1539-1559 in human Shp2 |
| | | (SEQ ID NO:222) | splice variants 1 and 2 see |
| | | | example 19 above) |
| COD1651 | shp2-2 | AAUUGGCCGGACAGGGA | Corresponds to nucleotides |
| | siRNA | CGUU | 1766-1786 in human Shp2 |
| | | (SEQ ID NO:223) | splice variants 1 and 2 see |
| | | | example 19 above) |

[0664] Analysis of siRNA Hu Shp2 Knockdowns in U2OS Cells by Flow Cytometry Analysis

[0665] Cells are seeded in 6-well tissue culture dishes at 1×10⁵ cells/well in 2 ml Dulbecco's Modified Eagle's Medium (DMEM) (Sigma)+10% Foetal Bovine Serum (FBS) (Perbio), and incubated overnight (37° C./5% CO₂).

[0666] For each well, 12 μl of 20 μM siRNA duplex (Dharmacon, Inc) (in RNAse-free H₂O) is mixed with 200 μl of Optimem (Invitrogen). In a separate tube 8 μl of oligofectamine reagent (Invitrogen) was mixed with 52 μl of Optimem, and incubated at room temperature for 7-10 mins. The oligofectamine/Optimem mix is then added dropwise to the siRNA/Optimem mix, and this is then mixed gently, before being incubated for 15-20 mins at room temperature. During this incubation the cells are washed once with DMEM (with no FBS or antibiotics added). 600 μl of DMEM (no FBS or antibiotics) is then added to each well.

[0667] Following the 15-20 min incubation, 128 μl of Optimem is added to the siRNA/oligofectamine/optimem mix, and this was added to the cells (in 600 μl DMEM). The transfection mix is added at the edge of each well to assist dilution before contact is made with the cells. Cells are then incubated with the transfection mix for 4 h (37° C./5% CO₂). Subsequently 1 ml DMEM+20% FBS is added to each well. Cells are then incubated at 37° C./5% CO₂ for 72 h. Cells are harvested by trypsinisation, washed in PBS, fixed in ice-cold 70% EtOH and stained with propidium iodide before Facs analysis.

[0668] siRNA Hu Shp2 knockdowns are conducted in U2OS. As shown in FIG. 3 major changes in the distribution of cells between cell cycle compartments (G1, S, G2/M) are seen with Shp2 siRNA COD1650 which is directed to both alternative transcripts of Shp2. An accumulation of cells in the S2 compartment cell cycle, is observed with a concomitant reduction in the G1 compartment population. This indicates that a proportion of cells may unable complete S-phase and enter mitosis.

[0669] Subsequent microscopic analysis is performed in order to look at phenotypes resulting from the Shp2 siRNA induced defect and check for the presence of large multinucleate cells which may, due to their size and ploidy, be excluded from the FACS analysis.

[0670] Analysis of Hu Shp2 siRNA Knockdowns in U20S Cells by Microscopy

[0671] The transfection method for samples for microscopy is identical to that for Facs except that cells are plated in wells containing a sterile glass coverslip. Cells are incubated with siRNA for 48 hours before formaldehyde fixation and co-staining with Dapi to reveal DNA (blue) and antibodies to reveal microtubules (red) and centrosomes (green). Antibodies used are: rat anti-alpha tubulin (YL12) (supplier Serotec) with secondary antibody goat anti-rat IgG-TRITC (supplier Jackson Immunoresearch) and mouse anti-gamma-tubulin (GTU88) with secondary antibody Alexagreen488-goat anti-mouseIgG (supplier Sigrna).

[0672] Phenotype analysis by microscopy is conducted on U2OS cells. Results from duplicate experiments in U2OS cells are shown in FIGS. 4, and Table 2 below. After siRNA no mitotic defects were seen, only a small increase in binucleate and apoptotic cells. These results are consistent with the Facs analysis, and in conjunction with the results of Corkscrew siRNA in Dme1-2 cells, they confirm that Shp2 is involved in cell cycle progression, in particular, in completing S-phase. Accordingly, modulators of Shp2 activity (as identified by the assays described above) may be used to treat any proliferative disease.

TABLE 2
Description of significant cell division defects after Shp2 siRNA
in U2OS cells.

| Gene/siRNA | Shp2/COD1650 |
|---|---|
| Cell Type | U2OS |
| Polyploidy | Normal |
| Mitotic Defects | Normal |
| Main knockout | No mitotic phenotype |
| phenotype | observed |
| Additional observations | Increased number of |
| | binuclear cells (0.6/field |
| | compared to 0.2/field in |
| | untreated) |
| | Increase in apoptotic |
| | cells |

### Example 19E

### Expression of Recombinant Hu Shp2 Protein in Insect Cells

[0673] A cDNA encoding the Human Shp2 coding region derived by RT-PCR is inserted into the baculovirus expression vector pFastbacHTc (Life Technologies). A baculovirus stock is generated and western blot of subsequent infections of Sf9 insect cells demonstrates expression of N-terminal 6-His tagged proteins of approximately 68 kD. The recombinant protein is purified by Ni—NTA resin affinity chromatography.

[0674] Similarly 6-His tagged Dlg proteins are expressed in bacteria by inserting cDNAs into bacterial expression plamids pDest17 or pET series. Protein expression in cultures of host E.coli cells transformed with recombinant plasmid is induced by addition of inducer chemical IPTG. The recombinant protein is purified by Ni—NTA resin affinity chromatography

### Example 19F

### Assay for Modulators of Shp2 Activity

[0675] Shp2 is a non-transmembrane-type protein tyrosine phosphatase that participates in the signal transduction pathways of a variety of growth factors and cytokines. Shp2 binds directly to the PDGF receptor, EGF receptor, and c-KIT in response to stimulation of cells with the corresponding receptor ligand and undergoes tyrosine phosphorylation. Shp2 is implicated in PDGF-induced RAS activation and EGF stimulation of the RAS-MAP kinase cascade that leads to DNA synthesis. Corkscrew (the putative Drosophila homolog of Shp2) is thought to be required for Ras1 activation or to function in conjunction with Ras1 during signaling by the Sevenless receptor tyrosine kinase. In addition Shp2 is implicated in insulin dependent signaling. Shp2 does not interact directly with the insulin receptor,but it binds through its SH2 domains to tyrosine-phosphorylated docking proteins such as IRS1, IRS2, and GAB1 in response to insulin. Overall Shp2 appears to play a role in growth factor-induced cell proliferation, through activation of the RAS-MAP kinase cascade. In addition to its role in receptor tyrosine kinase-mediated MAP kinase activation, Shp2 may play an important role, partly through its interaction with the membrane glycoprotein SHPS-1, in the activation of MAP kinase in response to the engagement of integrins by the extracellular matrix.

[0676] phosphotyrosyl proteins or peptides derived from SHPS-1, IRS1 or PDGF. An assay for modulators of Shp2 activity would consist of detection of dephosphorylation of ligand proteins, or phosphotyrosyl peptides derived from ligand proteins, described above e.g. phosphotyrosyl proteins or peptides derived from SHPS-1, IRS1 or PDGF (Takada et al 1998). Dephosphorylation of the substrate would be detected by quantifying the released inorganic phosphate, or by detecting loss of phosphate using an anti-phosphotyrosine antibody.

### Example 20

### Category 3

[0677] Line ID—500

[0678] Phenotype—Viable, High mitotic index, colchicines-type overcondensed chromosomes, a few polyploid cells

[0679] Annotated Drosophila genome genomic segment containing P element insertion site (and map position)—AE003422 (2C)

[0680] P element insertion site—247,403

[0681] Annotated Drosophila genome Complete Genome candidate

[0682] CG4399—EAST

(SEQ ID NO:224)

ATGTCTAGCCGGAAGGTGCCAGGAGGCTCTGGAGGAGCTGACGAATCCAC
AGCAGCAGCTGCCCCCCTGGATGATAATGCCAATGCCAGTGTGGAGATTC
CAGACAGCAGCGAGGAGCCAGCAATGGGCGTCGGCGAAGAGATGTCTATC
ATAAGCAAAACACGCACCTCAACTTTGTCAGTGGAGCCCGCTAAGGAGCC
AACAGTAACAGCAGAGCTGGAAGGCGAAAAAGAGCTGGAATCGAATCCAG
TCTCCAAAACTCCTAGGTCCACGCCTACGCCAACCCTTACGCCAGCCGTC
ACGCCTACCGCCAGTGATGGAGTGGCGGCCAAGAGCGTGAGGGTTACCCG
GCACTCGTCGCCACTGCTTCTGATCATCTCGCCCACGACAAGTAGACGTG
AGGTCGGCGACGGAGAGCTAGACACCGAGGAACCAACGGGATCGGGTGGC
CAAAGAAAGAGCTCCGTGGAGCGATCTTTGGCGCCCGTTATACGCGGACG
AAAGTCCATCAAGGATCTGAAAGAAGCCAAAGAAGTCAAGTCCGAGGAGC
CGCCTGCCGCAGCATCAGAGTCACGAGCTGCAAGTGGAGTGACGCCTGGC
CAGGTCAAGGAACAGCATGTCGCGGATGGCAACGAAATGGAATCCTTGCC
AATCACAGACAAGAAAGACCACAAAGACACAAAAGACAAGGGAGATGAGC
GGGAAACCGATCAGGAGGAAGAGAAGGAAAAATCAGCTGATACAGAAATA
ATTGCAGATACAGAAAAAACTTCGGAGAAACAAAAGTATACAGAGAAGGA
CAAAGCTGCCGATAAAGATGGAGGAAAAGAAAAAGATATTGATGCAAATA
AGGATATAGATAAGGAGAAGGAAAAGGTCAAGGAAGTACTTCCGCCAGTG
GTGCCTATAGCACCAGTGACACCCACTTGTAACCGTGTCACACGTAAATC
ACATGCCCAGGAGCAGGCGATTAACACGCGGGTCACTCGCAATCGTCGCC
AGTCCTCTACAGTTGGAGCCAACTCCACCGCGTCTTTGGTAGCTGCATCC
TCCTCAGTAACAGAGCAACCCCCTCCATCTCGCGGTCGACGGAAGAAGCC
AGTGGTGGTGGCTCCTCCCTTGGAGCCTGCGGTAAAACGGAAGCGATCGC
AAGATGTTGAAGCCGACTCAGACGCCAACAACAGCACGAAATACAGCAAG
GTGGAAGTGGTAAAGTCTGAGGAAGCTGAGGCACCAGAGGAGGACTCCAG
TGCCGTGCCCATTAAGCAGGAATCTGTTGATGGCAACGAGGTCAGTTCTA
TTTCTCCAACAGTCACGCCCACACCCACACCTGCGCCAACACCAGCTCCA
GTCCCGGGCAGTCGACGGGGTCGTGGGCGCCCGCAGAACAGGAACTCCTC
TTCGCCTGCAACCACAACGCGGGCAACGCGGCTAAGCAAGGCGGGATCAC
CGGTTATCCTGACGCCAGTAGCCCAGGAACCGGCGCCACCGAAACGGCGG
CGAGTCGGCTCCAGCACACGGAAGACTGTCTCGGCCAGCTCGCTGGCACC
CAGCTCGCAGGGCGGCGCCGGGGATGAGGACTCCAAGGACAGTATGGCCT
CGTCCATGGACGACCTGCTGATGGCCGCAGCAGATATCAAGCAGGAGAAG
CTGACGCCCGATTTCGACGATAGTTTGATGCCAGAAGGCCTGCCCTCTAC
TTCTGGTGCGTCGAGTGCCAATGGTCATTCCTGCACCGAACCGCTTACTG
TGGACACGGAAATTAATGTTAAGCCCGCTGATTCCAAAGTAAAACCAAAG
GAGTCACCGGTGGTAGCAGTCGAGGAATCTCCATCACAATCCGAAACGCA
ATCTGCAAAGGTGTCAGCGCATGCGGGGAAGGCTCCATCTCTTAGTCCAG
ATATGATAAGTGAAGGCGTGAGCGCGGTCAGTGTTCGAAAGTTTTATAAG
AAGCCTGAGTTCCTGGAAAACAATCTGGGCATTGAAAAGGATCCGGAGCT
AGGTGAAATCGTTCAGACGGTTAGTAACAATGACACGGAAACAGATGTGG
AGATGGCTGTTGATGGCGAGGTGAATCAACCGTCAACTCCCAAGTCGCAG
GATAAAAAGAAAGAGGAGCAGGAAAAGAATCAGAAATCAGGGCTAAAGGC
AGCAAAGAAGGCTCCTGCTAAGTTAGAACCTAAAGCTGAAGACATTTCTG
AAATTCTTACTGACGTTCCTGTTGATATTTCGACTGAGGCAGTAGAAATT
ATAGAAGAAGCAGAGGAAGACACTTGTTCAAATAGCTCAATCAAACCAGG
TGAGCTCCGACTGGACGAGAGCAACGATGAACCTGAACTGCTTCTTGAAG
ACGCCCTCATAGTCAATGGTGATGAGAATGAGACACCAGATCAACCGGAG
GAAAAGGAGGACCAGGTGGAGTTCTTCCATACAGGAGAATACGACGACTT
TGAGCACGAGATTATGGTGGAGCTGGCGAAGGAGGGGGTGCTAGATGCCA
GCGGCAATGCATTAAGTCAGCAAAAGGTAGAACTTGAGCATCCCGAGGAT
GTAACTCTACACGAATCAAAAAATGACATAGAAGCCGAAGAATCGGTTGA
ACGTAAGCCTCTTAAGGACCCGTCGGTTGCGGACGAAATGGAGGACATGA
ATGAGGAATCCTATATTGACATTAAGGACCAGACAAATCAACTGTTAGTT
GAACACTTGGCAGAAGAGGCCATGGAAGCGGACTGCGGTCCCGAGGATAA
CAAGGAGAACTTGTCCACGTCTGCTTCGAGCACCGCTGCCGATGGTCTAG
ATATTCAGTTGGCCATCAAGGAGGATGACGACGAGGAGAAACCGCTTGCA
GTTATCGCTGACGAACAGAAGCCTGGGCTGCTGTTGACCAATGACATGAA
AGTGGATGAGAAACCAAATGGCAAGCAGGAATCGGTCTGTGATGAGCACG
TTCAGCTGGTGCCAAACCTTCGTCAAGAACAGGAAATTCACTTACAAAAT
CTGGGCCTACTCACGCACCAGGCCGCTGAACATAGGCGCAAGTGTCTGCT
TGAGGCACAGGCCCGCCAGGCGCAAATGCAGCTCCAGCAACATCACCACC
ATCAGCACAAGCGACAAGGAGCGCGCGGAGGAGGCAGTGCCACTCATGTG
GAATCCAGCGGTACTTTGAAGACAGTCATCAAGCTGAACAGGAGCAGCAA
CGGAGGAGTAAGCGGTAGTGGCGGCCTGCCTACTGGTACAGTTATCCATG
GAGGCTGTGGCTCCTCTTCAGCTTCTTCCACGTCCTCCTCCTCGGTGGGC
AGTGCCACACGTAAGTCAAGCGGGACCTTGGGCTCAGGAGCGGGAGCAGG
AGCTGGCGTTCGCCGGCAGTCGCTTAAGATGACATTCCAGAAGGGTCGGG
CTCGTGGTCACGGTGCTGCGGATCGATCCGCCGATCAGTATGGCGCCCAC
GCCGAGGACTCCTACTACACCATTCAAAACGAGAACGAAGGTGCGAAAAA
GTTTGTTGTAACTACTGGTAATACCGGCCGCAAGACTAATAACCGTTTCA
GCTCAACTAACAACTACCACTCGACGGTAGCCTTGCACGGTAGCAACTCT
GCGCTCCAGTACTATTCGTCCCACTCGGAAAGTCAGGGACAGACGGACCA
CGGCTTCTATCAGATGGTCAAAAAGGACGAAAAGGAGAAGATCCTCATTC
CGGAAAAGGCCTCCTCGTTTAAGTTTCACCCAGGGAGACTGTGCGAAGAC
CAGTGCTACTACTGTAGCGGAAAGTTTGGCCTCTATGACACCCCCTGCCA
TGTTGGACAAATAAAGTCCGTGGAGCGCCAGCAGAAGATCCTAGCCAACG
AGGAGAAGCTCACCGTGGATAACTGCTTGTGCGACGCATGTTTTCGACAC
GTGGACCGCCGGGCAAATGTGCCATCCTATAAGAAGCGTCTTTCCGCTTC
AGGTCACTTGGAGATGGGGTCTGCAGCGGGATCTGCACTAGAGAAACAGT
TTGCTGGCGACAGCGGCGTCATTACGGAATCGGGTGGCGAAGCTGGTTCT
ACGGCAGCTGTGGCCGTGCAGCAACGATCTTGTGGCGTGAAGGACTGCGT
CGAAGCGGCACGACACTCGCTGCGGCGCAAGTGCATACGCAAGAGAGTAA
AGAAGTATCAGCTCAGCCTGGAGATTCCCGCAGGCTCGTCGAACGTGGGG
CTGTGTGAGGCACATTACAATACGGTCATCCAATTTTCCGGCTGCGTTCT
TTGCAAGCGTAGATTAGGCAAGAACCATATGTACAACATAACCACGCAGG
ACACAATTCGACTGGAAAAGGCGCTGTCCGAGATGGGCATCCCAGTTCAG
CTTGGCATGGGCACTGCAGTCTGCAAGCTGTGTCGCTATTTTGCCAACCT
TTTGATAAAGCCACCGGATAGCACCAAGGCACAAAAGGCGGAATTCGTGA
AGAACTACAGAAAGAGGCTCCTCAAGGTGCATAATCTGCAGGATGGCAGT
CATGAGCTGTCCGAAGCGGATGAAGAAGAGGCACCTAATGCAACGGAGAC
AGAAAGGCCAACCTCAGACGGACACGAAGATCCCGAGATGCCCATGGTAG
CGGACTATGATGGACCTACCGACTCCAATTCCAGTAGTTCTTCGACTGCA
GCCCTGGACACCAGCAAACAAATGTCCAAGCTTCAGGCCATCCTGCAGCA
AAATGTGGGAGCGGATGCGGCAGGAGCTGCGGGAACAGGAACTGTTGCAG
CAAGTCCCGGAGGAAGCGGATCTGGGGCAGATATCTCTAACGTATTGCGA
GGGAATCCGAACATTTCCATGCGCGAACTTTTCCACGGCGAGGAAGAGCT
GGGTGTGCAGTTCAAGGTGCCGTTCGGATGCAGCAGCAGCCAGCGTACTC
CGGAGGGCTGGACACGAGTGCAGACTTTCCTACAATACGATGAGCCGACG
CGCCGCCTCTGGGAGGAGTTGCAAAAGCCGTACGGAAATCAGAGCTCATT
TCTGCGCCACTTGATACTATTAGAGAAGTACTACCGAAACGGAGATCTCG
TCCTAGCACCGCATGCTTCCTCCAATGCCACGGTTTACACAGAGACTGTT
CGTCAGCGGCTGAATTCGTTTGATCACGGTCACTGCGGTGGATTGAACAT
CGCAGGCAGCCCTTCTTCTTCGGGTTCCGGCAAGCGCAGTGGAGTTCCTC
AACCTACGGGTGCCAGTGTGCTGGCCACCGCCCTCACAACACCCTTGACA
AGCCATTCATCCTCCTCTGCATCCATTTCCTCCGAACAGCATTCGTCGGT
TGATCCTGTCATTCCGCTGGTAGACCTCAATGATGACGATGAAGGCGAAG
ATGGGGCAGGAGGAGCGGGCGAAAGGGAGTCGACAAATAGGCAGCAGGAC
GTAATCTTGGAATGCCTTAGAACTGCCTCTGTGGACAAGCTGACTAAGCA
GCTCAGCTCGAATGCGGTGACGATTATCGCCCGGCCCAAAGACAAATCGC
AGCTCTCCTGCAACAGCGGATCCTCCACGTCCATTTCCAGCTCCTCGTCC
GCTATTTCCTCGCCGGAGGAAGTGGCCGTCACTAAGGTTACAGCAGTCGC
ACCAGTCCAGTCCAAGGATGCACCGCCACTGGCGCCAGCAAGTAGCGGTG
TTAGCAACAGTCGTAGTATCCTTAAAACCAACCTCTTGGGCATGAACAAG
GCCGTGGAACTCGTGCCCTTAACGACTGCCCCCCACGCTTACAAGCCAAC
TGGATGCCATAAGCCTGAGAAACAGCAAAAGATTCTTGACGTGGCCAATA
AGCAGCCCGGTAGCCAGGGGGAACCGGTACCATCAAGCGCCTTGCTTGGC
CTGCAGTCAAAGCTAAAGCCTCCAACGCATCAGCAGCAGGTCAGCGGATC
AGGAGCGGGAACTAGTGGTTCTCAGAAGCCATCTAATGTGGCGCAATTGC
TTAGCTCTCCACCGGAGCTAATCAGCTTGCATCGACGGCAGACCAGCGGA
GCAGCAGCGGGGTCCAGCAGCTTCCTTCAGGGCAAGAGGCTTCAACTTCC
ACGATCTGGAGCAGGGCCTTCAGGAGCGGGAACGGGAACAGGCGCTGGAG
CAGCAGGAAGCCGCAGTGCGGGTGGACCACCACCGCCCAATGTGGTCATA
CTGCCGGACGCCTTAACCCCCCAGGAGCGACACGAGAGCAAGAGCTGGAA
GCCAACGCTGATACCGCTGGAGGATCAGCACAAGGTGCCGAACAAATCAC
ATGCTCTTTATCAGACCGCCGACGGTCGAAGGTTGCCCGCCCTGGTGCAA
GTGCAGTCTGGTGGCAAGCCATACCTCATCTCTATCTTCGACTATAACCG
CATGTGCATCTTGCGAAGGGAAAAGCTGATGCGGGACCAGTTGCTCAAGA
GTAACGCCAAGCCAAAGCCGCAGAACCAGCAACAGCAGCAGGGCCAAACG
CACCAGCAGCAGCAGAATTCCGCCGCATCGGCGGCTGCCTTCTCCAACAT
GGTGAAGTTGGCCCAGCAACACACGGCGCGACAGCAGCTTCAGCAGCTGC
AACAGAAGCCACAACAGCAGCAACAATTGCCCACTTTGCAGCCAGGTGGG
GTGCGACTTGCCCGGCTGCCGCAAAAACTACTGATGCCACCACTGACTAA
TCCGCAGATTGGCAGTCAAGCACCCAACTTACAGCCGTTGCTGTCTAGTA
CGCTGGATAACAGCAACAACTGCTGGCTGTGGAAAAACTTTCCTGATCCC
AATCAGTATCTGCTAAATGGAAACGGAGGGGGTGCCGGGAGCTCCTCCAG
CAAGTTGCCACATCTCACGGCCAAACCAGCCACGGCAACTAGTAGCTCCG
GAGCGGCCAACAAATCAGCAGGAAGCCTATTTACCCTCAAGCAGCAGCAG
CACCAGCAGAAACTCATCGACAACGCTATCATGTCAAAGATACCCAAAAG
TCTGACAGTAATACCGCAGCAGATGGGTGGTAATACCGGTGGCGATATGG
GGGGCAGCAGCTCCTCCGGCAAGGACTGATGACGGCGAAGGAGGGCGCCA
TGGCCATTAGCCGTAGCGCCGGAGGTAACCCGGCGAAGTAGTAGGATCAA
CAAGCAGGCGACGTGCAGCTTAAGCGGCGATCTTCAGAACAAGAGGTGAC
CAGCGGCGGCTCCATGGATATCACAAACTCCACAATTCCATGGCTGCAGT
AGAATAAGTGATACACT

(SEQ ID NO:225)

MSSRKVPGGSGGADESTAAAAPLDDNANASVEIPDSSEEPAMGVGEEMSI
ISKTRTSTLSVEPAKEPTVTAELEGEKELESNPVSKTPRSTPTPTLTPAV
TPTASDGVAAKSVRVTRHSSPLLLIISPTTSRREVGDGELDTEEPTGSGG
QRKSSVERSLAPVIRGRKSIKDLKEAKEVKSEEPPAAASESRAASGVTPG
QVKEQHVADGNEMESLPITDKKDHKDTKDKGDERETDQEEEKEKSADTEI
IADTEKTSEKQKYTEKDKAADKDGGKEKDIDANKDIDKEKEKVKEVLPPV
VPIAPVTPTCNRVTRKSHAQEQAINTRVTRNRRQSSTVGANSTASLVAAS
SSVTEQPPPSRGRRKKPVVVAPPLEPAVKRKRSQDVEADSDANNSTKYSK
VEVVKSEEAEAPEEDSSAVPIKQESVDGNEVSSISPTVTPTPTPAPTPAP
VPGSRRGRGRPQNRNSSSPATTTRATRLSKAGSPVILTPVAQEPAPPKRR
RVGSSTRKTVSASSLAPSSQGGAGDEDSKDSMASSMDDLLMAAADIKQEK
LTPDFDDSLMPEGLPSTSGASSANGHSCTEPLTVDTEINVKPADSKVKPK
ESPVVAVEESPSQSETQSAKVSAHAGKAPSLSPDMISEGVSAVSVRKFYK
KPEFLENNLGIEKDPELGEIVQTVSNNDTETDVEMAVDGEVNQPSTPKSQ
DKKKEEQEKNQKSGLKAAKKAPAKLEPKAEDISEILTDVPVDISTEAVEI
IEEAEEDTCSNSSIKPGELRLDESNDEPELLLEDALIVNGDENETPDQPE
EKEDQVEFFHTGEYDDFEHEIMVELAKEGVLDASGNALSQQKVELEHPED
VTLHESKNDIEAEESVERKPLKDPSVADEMEDMNEESYIDIKDQTNQLLV
EHLAEEAMEADCGPEDNKENLSTSASSTAADGLDIQLAIKEDDDEEKPLA
VIADEQKPGLLLTNDMKVDEKPNGKQESVCDEHVQLVPNLRQEQEIHLQN
LGLLTHQAAEHRRKCLLEAQARQAQMQLQQHHHHQHKRQGARGGGSATHV
ESSGTLKTVIKLNRSSNGGVSGSGGLPTGTVIHGGCGSSSASSTSSSSVG
SATRKSSGTLGSGAGAGAGVRRQSLKMTFQKGRARGHGAADRSADQYGAH
AEDSYYTIQNENEGAKKFVVTTGNTGRKTNNRFSSTNNYHSTVALHGSNS
ALQYYSSHSESQGQTDHGFYQMVKKDEKEKILWEKASSFKFHPGRLCED
QCYYCSGKFGLYDTPCHVGQIKSVERQQKILANEEKLTVDNCLCDACFRH
VDRRANVPSYKKRLSASGHLEMGSAAGSALEKQFAGDSGVITESGGEAGS
TAAVAVQQRSCGVKDCVEAARHSLRRKCIRKRVKKYQLSLEIPAGSSNVG
LCEAHYNTVIQFSGCVLCKRRLGKNHMYNITTQDTIRLEKALSEMGWVQ
LGMGTAVCKICRYFANLLIKPPDSTKAQKAEFVKNYRKRLLKVHNLQDGS
HELSEADEEEAPNATETERPTSDGHEDPEMLPMVADYDGPTDSNSSSSSTA
ALDTSKQMSKLQAILQQNVGADAAGAAGTGTVAASPGGSGSGADISNVLR
GNPNISMRELFHGEEELGVQFKVPFGCSSSQRTPEGWTRVQTFLQYDEPT
RRLWEELQKPYGNQSSFLRHLILLEKYYRNGDLVLAPHASSNATVYTETV
RQRLNSFDHGHCGGLNIAGSPSSSGSGKRSGVPQPTGASVLATALTTPLT
SHSSSSASISSEQHSSVDPVIPLVDLNDDDEGEDGAGGAGERESTNRQQD
VILECLRTASVDKLTKQLSSNAVTIIARPKDKSQLSCNSGSSTSISSSSS
AISSPEEVAVTKVTAVAPVQSKDAPPLAPASSGVSNSRSTLKTNLLGMNK
AVELVPLTTAPHAYKPTGCHKIPEKQQKILDVANKQPGSQGEPVPSSALLG
LQSKLKPPTHQQQVSGSGAGTSGSQKPSNVAQLLSSPPELISLHRRQTSG
AAAGSSSFLQGKRLQLPRSGAGPSGAGTGTGAGAAGSRSAGGPPPPNVVI
LPDALTPQERHESKSWKPTLIPLEDQHKVPNKSHALYQTADGRRLPALVQ
VQSGGKPYLIS1TFDYNRMCILRREKLMRDQLLKSNAKPKPQNQQQQQGQT
HQQQQNSAASAAAFSNMVKLAQQHTARQQLQQLQQKPQQQQQLPTLQPGG
VRLARLPQKLLMPPLTNPQIGSQAPNLQPLLSSTLDNSNNCWLWKNFPDP
NQYLLNGNGGGAGSSSSKLPHLTAKPATATSSSGAANKSAGSLFTLKQQQ
HQQKKLIDNAIMSKIPKSLTVIPQQMGGNTGGDMGGSSSSGKD

[0683] Human homologue of Complete Genome candidate

[0684] AAF13722—neurofilament protein

| | | |
|---|---|---|
| 1 | atgatgagct tcggcggcgc ggacgcgctg ctgggcgccc cgttcgcgcc gctgcatggc | (SEQ ID NO:226) |
| 61 | ggcggcagcc tccactacgc gctagcccga aagggtggcg caggcgggac gcgctccgcc | |
| 121 | gctggctcct ccagcggctt ccactcgtgg acacggacgt ccgtgagctc cgtgtccgcc | |
| 181 | tcgcccagcc gcttccgtgg cgcaggcgcc gcctcaagca ccgactcgct ggacacgctg | |
| 241 | agcaacgggc cggagggctg catggtggcg gtggccacct cacgcagtga gaaggagcag | |
| 301 | ctgcaggcgc tgaacgaccg cttcgccggg tacatcgaca aggtgcggca gctggaggcg | |
| 361 | cacaaccgca gcctggaggg cgaggctgcg gcgctgcggc agcagcaggc gggccgctcc | |
| 421 | gctatgggcg agctgtacga gcgcgaggtc cgcgagatgc gcggcgcggt gctgcgcctg | |
| 481 | ggcgcggcgc gcggtcagct acgcctggag caggagcacc tgctcgagga catcgcgcac | |
| 541 | gtgcgccagc gcctagacga cgaggcccgg cagcgagagg aggccgaggc ggcggcccgc | |
| 601 | gcgctggcgc gcttcgcgca ggaggccgag gcggcgcgcg tggacctgca gaagaaggcg | |
| 661 | caggcgctgc aggaggagtg cggctacctg cggcgccacc accaggaaga ggtgggcgag | |
| 721 | ctgctcggcc agatccaggg ctccggcgcc gcgcaggcgc agatgcaggc cgagacgcgc | |
| 781 | gacgccctga agtgcgacgt gacgtcggcg ctgcgcgaga ttcgcgcgca gcttgaaggc | |
| 841 | cacgcggtgc agagcacgct gcagtccgag gagtggttcc gagtgaggct ggaccgactg | |
| 901 | tcggaggcag ccaaggtgaa cacagacgct atgcgctcag cgcaggagga gataactgag | |
| 961 | taccggcgtc agctgcaggc caggaccaca gagctggagg cactgaaaag caccaaggac | |
| 1021 | tcactggaga ggcagcgctc tgagctggag gaccgtcatc aggccgacat tgcctcctac | |
| 1081 | caggaagcca ttcagcagct ggacgctgag ctgaggaaca ccaagtggga gatggccgcc | |
| 1141 | cagctgcgag aataccagga cctgctcaat gtcaagatgg ctctggatat agagatagcc | |
| 1201 | gcttacagaa aactcctgga aggtgaagag tgtcggattg gctttggccc aattcctttc | |
| 1261 | tcgcttccag aaggactccc caaaattccc tctgtgtcca ctcacataaa ggtgaaaagc | |
| 1321 | gaagagaaga tcaaagtggt ggagaagtct gagaaagaaa ctgtgattgt ggaggaacag | |
| 1381 | acagaggaga cccaagtgac tgaagaagtg actgaagaag aggagaaaga ggccaaagag | |
| 1441 | gaggagggca aggaggaaga agggggtgaa gaagaggagg cagaaggggg agaagaagaa | |
| 1501 | acaaagtctc ccccagcaga agaggctgca tccccagaga aggaagccaa gtcaccagta | |
| 1561 | aaggaagagg caaagtcacc ggctgaggcc aagtccccag agaaggagga agcaaaatcc | |
| 1621 | ccagccgaag tcaagtcccc tgagaaggcc aagtctccag caaaggaaga ggcaaagtca | |
| 1681 | ccgcctgagg ccaagtcccc agagaaggag gaagcaaaat ctccagctga ggtcaagtcc | |
| 1741 | cccgagaagg ccaagtcccc agcaaaggaa gaggcaaagt caccggctga ggccaagtct | |
| 1801 | ccagagaagg ccaagtcccc agtgaaggaa gaagcaaagt caccggctga ggccaagtcc | |
| 1861 | ccagtgaagg aagaagcaaa atctccagct gaggtcaagt ccccggaaaa ggccaagtct | |
| 1921 | ccaacgaagg aggaagcaaa gtcccctgag aaggccaagt cccctgagaa ggccaagtcc | |
| 1981 | ccagagaagg aagaggccaa gtcccctgag aaggccaagt ccccagtgaa ggcagaagca | |
| 2041 | aagtcccctg agaaggccaa gtccccagtg aaggcagaag caaagtcccc tgagaaggcc | |
| 2101 | aagtccccag tgaaggaaga agcaaagtcc cctgagaagg ccaagtcccc agtgaaggaa | |
| 2161 | gaagcaaagt cccctgagaa ggccaagtcc ccagtgaagg aagaagcaaa gacccccgag | |
| 2221 | aaggccaagt ccccagtgaa ggaagaagcc aagtccccag agaaggccaa gtccccagag | |
| 2281 | aaggccaaga ctcttgatgt gaagtctcca gaagccaaga ctccagcgaa ggaggaagca | |
| 2341 | aggtcccctg cagacaaatt ccctgaaaag gccaaaagcc ctgtcaagga ggaggtcaag | |
| 2401 | tccccagaga aggcgaaatc tcccctgaag gaggatgcca aggcccctga gaaggagatc | |
| 2461 | ccaaaaaagg aagaggtgaa gtccccagtg aaggaggagg agaagcccca ggaggtgaaa | |
| 2521 | gtcaaagagc ccccaaagaa ggcagaggaa gagaaagccc ctgccacacc aaaaacagag | |
| 2581 | gagaagaagg acagcaagaa agaggaggca cccaagaagg aggctccaaa gcccaaggtg | |
| 2641 | gaggagaaga aggaacctgc tgtcgaaaag cccaaagaat ccaaagttga agccaagaag | |
| 2701 | gaagaggctg aagataagaa aaaagtcccc accccagaga aggaggctcc tgccaaggtg | |
| 2761 | gaggtgaagg aagacgctaa acccaaagaa aagacagagg tggccaagaa ggaaccagat | |
| 2821 | gatgccaagg ccaaggaacc cagcaaacca gcagagaaga aggaggcagc accggagaaa | |
| 2881 | aaagacacca aggaggagaa ggccaagaag cctgaggaga aacccaagac agaggccaaa | |
| 2941 | gccaaggaag atgacaagac cctctcaaaa gagcctagca agcctaaggc agaaaaggct | |
| 3001 | gaaaaatcct ccagcacaga ccaaaaagac agcaagcctc cagagaaggc cacagaagac | |
| 3061 | aaggccgcca aggggaagta aggcagggag aaaggaacat ccggaacagc caaagaaact | |
| 3121 | cagaagagtc ccggagctca aggatcagag taacacaatt ttcacttttt ctgtctttat | |
| 3181 | gtaagaagaa actgcttaga tgacggggcc tccttcttca aacaggaatt tctgttagca | |
| 3241 | atatgttagc aagagagggc actcccaggc ccctgccccc atgccctccc caggcgatgg | |
| 3301 | acaattatga tagcttatgt agctgaatgt gatacatgcc gaatgccaca cgtaaacact | |
| 3361 | tgactataaa aactgccccc ctcctttcca aataagtgca tttattgcct ctatgtgcaa | |
| 3421 | ctgacagatg accgcaataa tgaatgagca gttagaaata cattatgctt gagatgtctt | |
| 3481 | aacctattcc caaatgcctt ctgttttcca aaggagtggt caagcccttg cccagagctc | |
| 3541 | tctattctgg aagagcggtc caggtggggc cgggcactgg ccactgaatt atgccagggc | |
| 3601 | gcactttcca ctggagttca ctttcaattg cttctgtgca ataaaaccaa gtgcttataa | |
| 3661 | aatgaaaaaa aaaaaaaaaa tgctgttatt ctctttccct gggaaggctg ggggcagggc | |
| 3721 | aggggaggtc tggatgtgac accccagact gcatgggact gagcaagcat cagt | |
| 1 | mmsfggadal lgapfaplhg ggslhyalar kggaggtrsa agsssgfhsw trtsvssvsa | (SEQ ID NO:227) |
| 61 | spsrfrgaga asstdsldtl sngpegcmva vatsrsekeq lqalndrfag yidkvrqlea | |
| 121 | hnrslegeaa alrqqqagrs amgelyerev remrgavlrl gaargqlrle qehllediah | |
| 181 | vrqrlddear qreeaeaaar alarfaqeae aarvdlqkka qalqeecgyl rrhhqeevge | |
| 241 | llgqiqgsga aqaqmqaetr dalkcdvtsa lrelraqieg havqstlqse ewfrvrldrl | |
| 301 | seaakvntda mrsaqeeite yrrqlqartt elealkstkd slerqrsele drhqadiasy | |
| 361 | qeaiqqldae lrntkwemaa qlreyqdlln vkmaldieia ayrkllegee crigfgpipf | |
| 421 | slpeglpkip svsthikvks eekikvveks eketviveeq teetqvteev teeeekeake | |
| 481 | eegkeeegge eeeaeggeee tksppaeeaa spekeakspv keeakspaea kspekeeaks | |
| 541 | paevkspeka kspakeeaks ppeakspeke eakspaevks pekakspake eakspaeaks | |
| 601 | pekakspvke eakspaeaks pvkeeakspa evkspekaks ptkeeakspe kakspekaks | |
| 661 | pekeeakspe kakspvkaea kspekakspv kaeakspeka kspvkeeaks pekakspvke | |
| 721 | eakspekaks pvkeeaktpe kakspvkeea kspekakspe kaktldvksp eaktpakeea | |
| 781 | rspadkfpek akspvkeevk spekaksplk edakapekei pkkeevkspv keeekpqevk | |
| 841 | vkeppkkaee ekapatpkte ekkdskkeea pkkeapkpkv eekkepavek pkeskveakk | |
| 901 | eeaedkkkvp tpekeapakv evkedakpke ktevakkepd dakakepskp aekkeaapek | |
| 961 | kdtkeekakk peekpkteak akeddktlsk epskpkaeka ekssstdqkd skppekated | |
| 1021 | kaakgk | |

[0685] Putative function
[0686] unknown

### Example 21

### Category 3

[0687] Line ID—265

[0688] Phenotype—Lethal phase pharate adult. High mitotic index, rod like overcondensed chromosomes, few anaphases with lagging chromosomes

[0689] Annotated Drosophila genome genomic segment containing P element insertion site (and map position)—AE003509 (17B4-5)

[0690] P element insertion site—52,563

[0691] Annotated Drosophila genome Complete Genome candidate

[0692] CG6407—Wnt5

(SEQ ID NO:228)

CAGTTGTTTACAATTTGTCGTTGAGGGTGGATTACTTCGTCGCGAGTTTC
GTTCGTGCATGATGCGGTTGTGGTTGATTGTATACATACATACTATGCAC
AAATCCAGTTCTCATTTTGTTATTTTACAAATTCTCAGCGAGCGCATGAA
CTGGCAGCCTATAGCGAGCAGCTAATCACAATATTTACGGCAGATTCGTG
GACTCAAGGAAATTCAGCCAGCAGCCAATCGATTTTCTAGTGTTATCGAA
AAACATTTTTCATTCCTTCATTTCGTTCAACTAACAATACTAGTTACTAC
TAACAATACTCTGTAATAGTAATAGTAAGAGGAACAGGAATAGGAATACA
CATACTCCAAAGCGATAATGAGTTGCTACAGAAAAAGGCACTTTCTATTG
TGGCTCTTGCGTGCTGTGTGTATGTTGCACTTAACCGCGAGAGGGGCATA
TGCCACAGTTGGGTTGCAAGGAGTGCCGACATGGATATATCTCGGCCTCA
AGTCCCCCTTCATCGAGTTTGGCAACCAGGTGGAGCAGCTGGCCAATTCC
AGCATACCACTGAACATGACCAAGGACGAGCAGGCCAATATGCATCAAGA
GGGCCTACGCAAGCTCGGTACGTTCATAAAGCCAGTGGACCTGCGGGACT
CGGAGACTGGCTTCGTCAAGGCCGATCTCACCAAGAGACTGGTATTCGAT
AGACCGAACAACATTACATCTCGCCCTATTCACCCGATACAGGAGGAGAT
GGATCAGAAGCAGATAATCCTGCTCGACGAGGATACCGACGAGAATGGCC
TGCCAGCCAGTCTCACCGACGAGGATCGCAAGTTTATAGTGCCGATGGCG
CTCAAGAATATATCGCCCGATCCACGCTGGGCGGCCACTACACCGAGTCC
CTCCGCTTTGCAGCCGAACGCTAAAGCCATCTCGACCATTGTGCCCTCGC
CTCTGGCCCAGGTCGAGGGGGATCCCACGTCCAACATCGATGACCTGAAG
AAGCACATACTCTTCTTGCACAACATGACCAAGACCAATTCGAACTTCGA
GTCGAAATTCGTTAAATTCCCGAGCCTGCAAAAGGACAAGGCCAAGACAT
CGGGAGCTGGCGGTTCGCCGCCCAATCCCAAGCGGCCCCAGCGGCCGATT
CATCAGTATTCCGCGCCCATAGCCCCACCAACACCCAAGGTGCCCGCGCC
AGATGGCGGCGGCGTAGGAGGAGCAGCTTACAATCCCGGAGAGCAGCCAA
TTGGTGGCTACTATCAGAACGAGGAACTAGCGAATAATCAATCCCTTCTT
AAACCAACAGATACCGACTCCCATCCAGCGGCCGGCGGTAGCAGCCATGG
CCAGAAGAATCCCAGCGAGCCCCAGGTGATACTGCTCAACGAGACACTCT
CCACGGAGACCTCAATCGAAGCGGATCGCAGTCCATCGATAAACCAGCCC
AAGGCGGGATCGCCTGCGCGCACAACAAAGCGACCACCTTGCCTGCGCAA
TCCCGAGTCCCCGAAATGCATACGTCAGCGTCGGCGGGAGGAGCAACAGC
GGCAGCGGGAGCGGGACGAGTGGTTCCGCGGTCAGTCGCAGTACATGCAG
CCCCGGTTCGAGCCGATCATACAGACGATTAACAATACGAAGAGATTTGC
CGTATCAATCGAGATTCCAGACTCCTTTAAAGTATCCTCCGAGGGATCGG
ATGGGGAGTTGCTTTCGCGAGTCGAACGCTCGCAGCCCAGCATTAGTAGT
AGTAGTAGTAGCAGTAGTAGCAGTAGTAGGAAAATCATGCCAGACTATAT
TAAGGTATCCATGGAGAACAACACATCCGTCACGGATTATTTTAAGCACG
ACGTTGTGATGACATCGGCAGATGTCGCCAGCGATAGGGAATTCCTTATC
AAGAACATGGAGGAGCACGGAGGCGCTGGCTCCGCGAACAGTCATCACAA
TGATACGACTCCAACTGCAGACGCATATTCGGAGACAATCGATCTTAATC
CCAATAACTGCTATAGCGCAATAGGTCTAAGCAACAGCCAAAAGAAGCAA
TGTGTTAAGCACACCAGCGTGATGCCGGCCATAAGTCGTGGTGCCCGTGC
CGCCATCCAGGAGTGCCAGTTTCAGTTCAAGAATCGCCGCTGGAACTGCA
GCACAACGAACGACGAGACCGTATTTGGTCCCATGACCAGCCTGGCTGCT
CCCGAAATGGCCTTCATCCACGCCCTGGCCGCGGCCACGGTGACCAGCTT
CATAGCTCGCGCCTGCCGGGATGGCCAACTGGCCTCCTGCAGCTGCTCCC
GCGGCAGTCGACCCAAACAGCTCCACGACGACTGGAAGTGGGGCGGCTGT
GGCGACAACCTGGAGTTCGCCTACAAGTTCGCCACGGACTTCATCGATTC
GCGGGAGAAGGAAACCAATCGCGAGACGCGTGGCGTTAAGAGAAAACGCG
AGGAGATCAACAAGAATCGCATGCATTCCGATGACACGAATGCTTTTAAC
ATAGGTATTAAACGTAACAAAAACGTAGATGCTAAAAACGATACAAGTTT
GGTAGTGAGAAACGTTAGGAAAAGCACTGAGGCTGAAAACAGTCACATAC
TCAATGAGAACTTTGATCAGCACCTATTGGAACTAGAGCAGCGCATTACG
AAGGAGATACTTACATCCAAGATAGACGAGGAGGAGATGATTAAGCTGCA
GGAGAAGATCAAACAGGAGATTGTCAACACCAAGTTCTTCAAGGGTGAGC
AGCAGCCGCGCAAGAAGAAGCGAAAAAACCAGAGAGCCGCCGCCGATGCG
CCCGCCTATCCGAGGAACGGCATCAAGGAGAGCTACAAGGATGGCGGCAT
ATTGCCGCGCAGCACGGCCACTGTCAAGGCCAGGAGCCTGATGAACTTGC
ACAACAACGAGGCCGGACGTCGGGCGGTGATCAAGAAGGCCAGGATAACG
TGCAAGTGCCACGGCGTGTCCGGCTCCTGCAGCCTGATCACCTGCTGGCA
GCAATTGTCCTCCATCCGGGAGATTGGCGACTATCTGCGCGAGAAGTACG
AGGGCGCCACCAAGGTGAAGATCAACAAGCGTGGCCGCCTCCAGATCAAG
GACTTGCAATTCAAGGTGCCGACCGCTCACGATCTTATTTACCTAGACGA
AAGTCCCGACTGGTGCCGCAATAGCTATGCGCTGCATTGGCCGGGAACGC
ACGGACGTGTGTGCCACAAAAACTCGTCGGGATTGGAGAGCTGTGCCATC
CTCTGCTGCGGCCGGGGCTATAATACGAAGAACATTATAGTTAACGAACG
CTGCAATTGCAAATTTCACTGGTGTTGCCAGGTTAAATGTGAAGTTTGTA
CGAAGGTACTCGAGGAGCACACATGTAAATAGAGCGTTGATTGAATTCGA
ATGTCTTAATGTTTGTGACTAAGCCATGAAGGAAATAATCGTATTTAAAC
AGTCCTCTCCATTTTAATTGCCATTACCATACACCATCATATTGCTTCTT
CTTAAAATGCT

(SEQ ID NO:229)

MSCYRKRHFLLWLLRAVCMLHLTARGAYATVGLQGVPTWIYLGLKSPFIE
FGNQVEQLANSSIPLNMTKDEQANMHQEGLRKLGTFIKPVDLRDSETGFV
KADLTKRLVFDRPNNITSRPIHPIQEEMDQKQIILLDEDTDENGLPASLT
DEDRKFIVPMALKNISPDPRWAATTPSPSALQPNAKAISTIVPSPLAQVE
GDPTSNIDDLKKHILFLHNMTKTNSNFESKFVKFPSLQKDKAKTSGAGGS
PPNPKRPQRPIHQYSAPIAPPTPKVPAPDGGGVGGAAYNPGEQPIGGYYQ
NEELANNQSLLKPTDTDSHPAAGGSSHGQKNPSEPQVILLNETLSTETSI
EADRSPSINQPKAGSPARTTKRPPCLRNPESPKCIRQRRREEQQRQRERD
EWFRGQSQYMQPRFEPIIQTINNTKRFAVSIEIPDSFKVSSEGSDGELLS
RVERSQPSISSSSSSSSSSSRKIMPDYIKVSMENNTSVTDYFKHDVVMTS
ADVASDREFLIKNMEEHGGAGSANSHHNDTTPTADAYSETIDLNPNNCYS
AIGLSNSQKKQCVKHTSVMPAISRGARAAIQECQFQFKNRRWNCSTTNDE
TVFGPMTSLAAPEMAFIHALAAATVTSFIARACRDGQLASCSCSRGSRPK
QLHDDWKWGGCGDNLEFAYKFATDFIDSREKETNRETRGVKRKREEINIKN
RMHSDDTNAFNIGIKRNKNVDAKNDTSLVVRNVRKSTEAENSHILNENFD
QHLLELEQRITKEILTSKIDEEEMIKLQEKIKQEIVNTKFFKGEQQPRKK
KRKNQRAAADAPAYPRNGIKESYKDGGILPRSTATVKARSLMNLHNNEAG
RRAVIKKARITCKCHGVSGSCSLITCWQQLSSIREIGDYLREKYEGATKV
KINKRGRLQIKDLQFKVPTAHDLIYLDESPDWCRNSYALHWPGTHGRVCH
KNSSGLESCAILCCGRGYNTKNIIVNERCNCKFHWCCQVKCEVCTKVLEE
HTCK

[0693] Human homologue of Complete Genome candidate

[0694] AAA16842—hWNT5A

| | | |
|---|---|---|
| 1 | attaattctg gctccacttg ttgctcggcc caggttgggg agaggacgga gggtggccgc | (SEQ ID NO:230) |
| 61 | agcgggttcc tgagtgaatt acccaggagg gactgagcac agcaccaact agagaggggt | |
| 121 | cagggggtgc gggactcgag cgagcaggaa ggaggcagcg cctggcacca gggctttgac | |
| 181 | tcaacagaat tgagacacgt ttgtaatcgc tggcgtgccc cgcgcacagg atcccagcga | |
| 241 | aaatcagatt tcctggtgag gttgcgtggg tggattaatt tggaaaaaga aactgcctat | |
| 301 | atcttgccat caaaaaactc acggaggaga agcgcagtca atcaacagta aacttaagag | |
| 361 | acccccgatg ctcccctggt ttaacttgta tgcttgaaaa ttatctgaga gggaataaac | |
| 421 | atcttttcct tcttccctct ccagaagtcc attggaatat taagcccagg agttgctttg | |
| 481 | gggatggctg gaagtgcaat gtcttccaag ttcttcctag tggctttggc catatttttc | |
| 541 | tccttcgccc aggttgtaat tgaagccaat tcttggtggt cgctaggtat gaataaccct | |
| 601 | gttcagatgt cagaagtata tattatagga gcacagcctc tctgcagcca actggcagga | |
| 661 | ctttctcaag gacagaagaa actgtgccac ttgtatcagg accacatgca gtacatcgga | |
| 721 | gaaggcgcga agacaggcat caaagaatgc cagtatcaat tccgacatcg acggtggaac | |
| 781 | tgcagcactg tggataacac ctctgttttt ggcagggtga tgcagatagg cagccgcgag | |
| 841 | acggccttca catacgccgt gagcgcagca ggggtggtga acgccatgag ccgggcgtgc | |
| 901 | cgcgagggcg agctgtccac ctgcggctgc agccgcgccg cgcgccccaa ggacctgccg | |
| 961 | cgggactggc tctggggcgg ctgcggcgac aacatcgact atggctaccg ctttgccaag | |
| 1021 | gagttcgtgg acgcccgcga gcgggagcgc atccacgcca agggctccta cgagagtgct | |
| 1081 | cgcatcctca tgaacctgca caacaacgag gccggccgca ggacggtgta caacctggct | |
| 1141 | gatgtggcct gcaagtgcca tggggtgtcc ggctcatgta gcctgaagac atgctggctg | |
| 1201 | cagctggcag acttccgcaa ggtgggtgat gccctgaagg agaagtacga cagcgcggcg | |
| 1261 | gccatgcggc tcaacagccg gggcaagttg gtacaggtca acagccgctt caactcgccc | |
| 1321 | accacacaag acctggtcta catcgacccc agccctgact actgcgtgcg caatgagagc | |
| 1381 | accggctcgc tgggcacgca gggccgcctg tgcaacaaga cgtcggaggg catggatggc | |
| 1441 | tgcgagctca tgtgctgcgg ccgtgggtac gaccagttca agaccgtgca gacggagcgc | |
| 1501 | tgccactgca agttccactg gtgctgctac gtcaagtgca agaagtgcac ggagatcgtg | |
| 1561 | gaccagtttg tgtgcaagta gtgggtgcca cccagcactc agccccgctc ccaggacccg | |
| 1621 | cttatttata gaaagtacag tgattctggt ttttggtttt tagaaatatt ttttattttt | |
| 1681 | ccccaagaat tgcaaccgga accatttttt ttcctgttac catctaagaa ctctgtggtt | |
| 1741 | tattattaat attataatta ttatttggca ataatggggg tgggaaccac gaaaaatatt | |
| 1801 | tattttgtgg atctttgaaa aggtaataca agacttcttt tggatagtat agaatgaagg | |
| 1861 | gggaaataac acatacccta acttagctgt gtgggacatg gtacacatcc agaaggtaaa | |
| 1921 | gaaatacatt ttctttttct caaatatgcc atcatatggg atgggtaggt tccagttgaa | |
| 1981 | agagggtggt agaaatctat tcacaattca gcttctatga ccaaaatgag ttgtaaattc | |
| 2041 | tctggtgcaa gataaaaggt cttgggaaaa caaaacaaaa caaaacaaac ctcccttccc | |
| 2101 | cagcagggct gctagcttgc tttctgcatt ttcaaaatga taatttacaa tggaaggaca | |
| 2161 | agaatgtcat attctcaagg aaaaaaggta tatcacatgt ctcattctcc tcaaatattc | |
| 2221 | catttgcaga cagaccgtca tattctaata gctcatgaaa tttgggcagc agggaggaaa | |
| 2281 | gtccccagaa attaaaaaat ttaaaactct tatgtcaaga tgttgatttg aagctgttat | |
| 2341 | aagaattggg attccagatt tgtaaaaaga cccccaatga ttctggacac tagatttttt | |
| 2401 | gtttggggag gttggcttga acataaatga aatatcctgt attttcttag ggatacttgg | |
| 2461 | ttagtaaatt ataatagtag aaataataca tgaatcccat tcacaggttt ctcagcccaa | |
| 2521 | gcaacaaggt aattgcgtgc cattcagcac tgcaccagag cagacaacct atttgaggaa | |
| 2581 | aaacagtgaa atccaccttc ctcttcacac tgagccctct ctgattcctc cgtgttgtga | |
| 2641 | tgtgatgctg gccacgtttc caaacggcag ctccactggg tcccctttgg ttgtaggaca | |
| 2701 | ggaaatgaaa cattaggage tctgcttgga aaacagttca ctacttaggg atttttgttt | |
| 2761 | cctaaaactt ttattttgag gagcagtagt tttctatgtt ttaatgacag aacttggcta | |
| 2821 | atggaattca cagaggtgtt gcagcgtatc actgttatga tcctgtgttt agattatcca | |
| 2881 | ctcatgcttc tcctattgta ctgcaggtgt accttaaaac tgttcccagt gtacttgaac | |
| 2941 | agttgcattt ataagggggg aaatgtggtt taatggtgcc tgatatctca aagtcttttg | |
| 3001 | tacataacat atatatatat atacatatat ataaatataa atataaatat atctcattgc | |
| 3061 | agccagtgat ttagatttac agcttactct ggggttatct ctctgtctag agcattgttg | |
| 3121 | tccttcactg cagtccagtt gggattattc caaaagtttt ttgagtcttg agcttgggct | |
| 3181 | gtggccccgc tgtgatcata ccctgagcac gacgaagcaa cctcgtttct gaggaagaag | |
| 3241 | cttgagttct gactcactga aatgcgtgtt gggttgaaga tatctttttt tcttttctgc | |
| 3301 | ctcacccctt tgtctccaac ctccatttct gttcactttg tggagagggc attacttgtt | |
| 3361 | cgttatagac atggacgtta agagatattc aaaactcaga agcatcagca atgtttctct | |
| 3421 | tttcttagtt cattctgcag aatggaaacc catgcctatt agaaatgaca gtacttatta | |
| 3481 | attgagtccc taaggaatat tcagcccact acatagatag cttttttttt tttttttttt | |
| 3541 | ttttaataag gacacctctt tccaaacagg ccatcaaata tgttcttatc tcagacttac | |
| 3601 | gttgttttaa aagtttggaa agatacacat cttttcatac ccccccttag gaggttgggc | |
| 3661 | tttcatatca cctcagccaa ctgtggctct taatttattg cataatgata tccacatcag | |
| 3721 | ccaactgtgg ctctttaatt tattgcataa tgatattcac atcccctcag ttgcagtgaa | |
| 3781 | ttgtgagcaa aagatcttga aagcaaaaag cactaattag tttaaaatgt cacttttttg | |
| 3841 | gtttttatta tacaaaaacc atgaagtact ttttttattt gctaaatcag attgttcctt | |
| 3901 | tttagtgact catgtttatg aagagagttg agtttaacaa tcctagcttt taaaagaaac | |
| 3961 | tatttaatgt aaaatattct acatgtcatt cagatattat gtatatcttc tagcctttat | |
| 4021 | tctgtacttt taatgtacat atttctgtct tgcgtgattt gtatatttca ctggtttaaa | |
| 4081 | aaacaaacat cgaaaggctt attccaaatg gaag | |
| 1 | magsamsskf flvalaiffs faqvvieans wwslgmnnpv qmsevyiiga qplcsqlagl | (SEQ ID NO:231) |
| 61 | sqgqkklchl yqdhmqyige gaktgikecq yqfrhrrwnc stvdntsvfg rvmqigsret | |
| 121 | aftyavsaag vvnamsracr egelstcgcs raarpkdlpr dwlwggcgdn idygyrfake | |
| 181 | fvdarereri hakgsyesar ilmnlhnnea grrtvynlad vackchgvsg scslktcwlq | |
| 241 | ladfrkvgda lkekydsaaa mrlnsrgklv qvnsrfnspt tqdlvyidps pdycvrnest | |
| 301 | gslgtqgrlc nktsegmdgc elmccgrgyd qfktvqterc hckfhwccyv kckkcteivd | |
| 361 | qfvck | |

[0695] Putative function
[0696] Wnt oncogene

### Example 22

### Category 3

[0697] Line ID—392

[0698] Phenotype—Lethal phase larval stage 3-pharate adult, small brain and optic lobes, high mitotic index, rod-like overcondensed chromosomes, fewer ana- and telophases, overcondensed chromosomes in ana- and telophase

[0699] Annotated Drosophila genome genomic segment containing P element insertion site (and map position)—AE003495 (12D)

[0700] P element insertion site—35,688

[0701] Annotated Drosophila genome Complete Genome candidate

[0702] CG12482—novel protein

(SEQ ID NO:232)

ATGGGTTGCACCTGCTGTGACAATAAACCCAAGCCGGAGACCATTGAGAT
ATATTCGGTGAAAATCCGTGAGAATGGTACATACAAGTTGATCAAGATGC
AATTGGCGGATATTTGGAGTCACGGATGGGAGCTGCGTATCAATAACTTT
GCCGACAAGGAAAAGGTGCCGCACAACGAGAAGGATATTCGCAATCAGGT
GTCGGTGGCGCGCAAAGCCAAACAGAGTCTGTGGAACAATAATAAGCATT
TTGTGTACTGGTGCCGCTACGGAAGTCGTCAGCAGGATCTGCGAAAGCGA
CAGGTAACGACGAGTGCCAATCACGTGCTGCTGCACCTGATCAATTGA

(SEQ ID NO:233)

MGCTCCDNKPKPETIEIYSVKIRENGTYKLIKMQLADIWSHGWELRINNF
ADKEKVPHNEKDLRNQVSVARKAKQSLWNNNKHFVYWCRYGSRQQDLRKR
QVTTSANHVLLHLIN

[0703] Human homologue of Complete Genome candidate
[0704] none

[0705] Putative function
[0706] unknown

### Example 23

### Category 3

[0707] Line ID—37

[0708] Phenotype—Lethal phase larval stage 3. Small brain, few cells in mitosis, badly defined chromosomes form a broad bend, weak chromosome condensation, abnormal anaphases with broken chromosomes

[0709] Annotated Drosophila genome genomic segment containing P element insertion site (and map position)—AE003418 (1C1-2)

[0710] P element insertion site—105,970

[0711] Annotated Drosophila genome Complete Genome candidate

[0712] CG16983—skpA, SCF ubiquitin ligase subunit (3 splice variants)

(SEQ ID NO:234)

CCATTTGAAAGTATCGGTGTAATTTGTTTTCAGAGAAATTAATTTCCGTT
TACTGTGCAATTCGGTGTGAAAGTGTTCAGATTTATCAATGCGTATTCTG
CTTTCGACTTCGCCACCAATCTGTGCTGCAAGTTACCATTACCAGGTCCA
CCTGGTTCCCGCCAGTTTTCTTTCATTGTGGCTAGTTGTTGTTCGTGCCT
TCGATAAAGACGTTTAGAGGTGTTTTTAGAGTTTCGCCATCTGGTCACTA
TAGCCGTTTCGTTTTTTACATGCCCAGCATCAAGTTGCAATCTTCGGATG
AGGAGATCTTTGACACGGATATCCAGATCGCCAAGTGCTCCGGCACTATC
AAGACCATGCTGGAGGACTGCGGCATGGAGGACGATGAGAATGCCATTGT
GCCGTTGCCCAATGTGAATTCGACGATTCTTCGCAAGGTGCTTACCTGGG
CTCACTACCACAAGGACGACCCCCAGCCAACGGAGGATGATGAGAGCAAG
GAGAAGCGCACAGACGACATTATCTCATGGGATGCAGATTTCCTAAAAGT
CGACCAGGGCACACTGTTTGAGCTGATATTGGCAGCGAACTATCTGGACA
TTAAGGGCCTTCTGGAGCTCACCTGCAAGACTGTTGCAAACATGATTAAG
GGAAAGACTCCCGAGGAAATACGCAAGACCTTCAACATTAAGAAGGACTT
TTCGCCCGCCGAGGAGGAGCAGGTGCGCAAGGAGAACGAGTGGTGCGAGG
AGAAGTAAAGCGCGGCATTTCGCGGGACCAACATTAAGTTGAAACAGCTA
GGGGATTCGGGAACGAATTGGATTTGCAGCATTGCAACTTTACTTAGTTG
CTACTTTCATTTACATTTTTTTTTATTTTTAACCCCAGCAGAGACTCGAT
TTAAATTGTGTATAAATGATCTGTTGCTGATTTGATTCGCGGGGTTCATT
TTTTGTCGTAAATATATCTCATATACATACATATGCGAGATTGTAACACT
CTCTTTAACCTATTGGAGTAACACTTGATTTCACTTTAATAAATATAACT
ACCCAACAC

(SEQ ID NO:235)

MPSIKLQSSDEEIFDTDIQIAKCSGTIKTMLEDCGMEDDENAIVPLPNVN
STILRKVLTWAHYHKDDPQPTEDDESKEKRTDDIISWDADFLKVDQGTLF
ELILAANYLDIKGLLELTCKTVANMIKGKTPEEIRKTFNIKKDFSPAEEE
QVRKJENEWCEEK

(SEQ ID NO:236)

TTTCGCCATCTGGTCACTATAGCCGTTTCGTTTTTTACGTGAGTATTGTG
AATTTGGTGTGTTGATTTATATCTCAGTTGGAGCCTGCGTGGAAATAGTG
TCAGTACGTTTAAAGGCATCATCGTAAGGAAAGCCCAAAATGCCCAGCAT
CAAGTTGCAATCTTCGGATGAGGAGATCTTTGACACGGATATCCAGATCG
CCAAGTGCTCCGGCACTATCAAGACCATGCTGGAGGACTGCGGCATGGAG
GACGATGAGAATGCCATTGTGCCGTTGCCCAATGTGAATTCGACGATTCT
TCGCAAGGTGCTTACCTGGGCTCACTACCACAAGGACGACCCCCAGCCAA
CGGAGGATGATGAGAGCAAGGAGAAGCGCACAGACGACATTATCTCATGG
GATGCAGATTTCCTAAAAGTCGACCAGGGCACACTGTTTGAGCTGATATT
GGCAGCGAACTATCTGGACATTAAGGGCCTTCTGGAGCTCACCTGCAAGA
CTGTTGCAAACATGATTAAGGGAAAGACTCCCGAGGAAATACGCAAGACC
TTCAACATTAAGAAGGACTTTTCGCCCGCCGAGGAGGAGCAGGTGCGCAA
GGAGAACGAGTGGTGCGAGGAGAAGTAAAGCGCGGCATTTCGCGGGACCA
ACATTAAGTTGAAACAGCTAGGGGATTCGGGAACGAATTGGATTTGCAGC
ATTGCAACTTTACTTAGTTGCTACTTTCATTTACATTTTTTTTTATTTTT
AACCCCAGCAGAGACTCGATTTAAATTGTGTATAAATGATCTGTTGCTGA
TTTGATTCGCGGGGTTCATTTTTTGTCGTAAATATATCTCATATACATAC
ATATGCGAGATTGTAACACTCTCTTTAACCTATTGGAGTAACACTTGATT
TCACTTTAATAAATATAACTACCCAACAC

(SEQ ID NO:237)

MPSIKLQSSDEEIFDTDIQIAKCSGTIKTMLEDCGMEDDENAIVPLPNVN
STILRKVLTWAHYHKDDPQPTEDDESKEKRTDDIISWDADFLKVDQGTLF
ELILAANYLDIKGLLELTCKTVANMIKGKTPEEIRKTFNIKKDFSPAEEE
QVRKENEWCEEK

(SEQ ID NO:238)

AAACATCGAAAGTGCACAATCGTTTGTTATCTTTGTACGAAAACAACGGT
GATTTCCACACAGGCATAACCTGCAAGAGAAAGCCCAAAATGCCCAGCAT
CAAGTTGCAATCTTCGGATGAGGAGATCTTTGACACGGATATCCAGATCG
CCAAGTGCTCCGGCACTATCAAGACCATGCTGGAGGACTGCGGCATGGAG
GACGATGAGAATGCCATTGTGCCGTTGCCCAATGTGAATTCGACGATTCT
TCGCAAGGTGCTTACCTGGGCTCACTACCACAAGGACGACCCCCAGCCAA
CGGAGGATGATGAGAGCAAGGAGAAGCGCACAGACGACATTATCTCATGG
GATGCAGATTTCCTAAAAGTCGACCAGGGCACACTGTTTGAGCTGATATT
GGCAGCGAACTATCTGGACATTAAGGGCCTTCTGGAGCTCACCTGCAAGA
CTGTTGCAAACATGATTAAGGGAAAGACTCCCGAGGAAATACGCAAGACC
TTCAACATTAAGAAGGACTTTTCGCCCGCCGAGGAGGAGCAGGTGCGCAA
GGAGAACGAGTGGTGCGAGGAGAAGTAAAGCGCGGCATTTCGCGGGACCA
ACATTAAGTTGAAACAGCTAGGGGATTCGGGAACGAATTGGATTTGCAGC
ATTGCAACTTTACTTAGTTGCTACTTTCATTTACATTTTTTTTTATTTTT
AACCCCAGCAGAGACTCGATTTAAATTGTGTATAAATGATCTGTTGCTGA
TTTGATTCGCGGGGTTCATTTTTTGTCGTAAATATATCTCATATACATAC
ATATGCGAGATTGTAACACTCTCTTTAACCTATTGGAGTAACACTTGATT
TCACTTTAATAAATATAACTACCCAACAC

(SEQ ID NO:239)

MPSLKLQSSDEEIFDTDIQIAKCSGTIKTMLEDCGMEDDENAIVPLPNVN
STILRKVLTWAHYHKDDPQPTEDDESKEKRTDDIISWDADFLKVDQGTLF
ELILAANYLDIKGLLELTCKTVANMIKGKTPEEIRKTFNIKKDFSPAEEE
QVRKENEWCEEK

[0713] Human homologue of Complete Genome candidate

[0714] XP_{—}054159—hypothetical protein

```
(SEQ ID NO:240)
    1 gcctcccagc tctcgtcagc ctcctgctgg ccatctcctt aacaccaaac actatgcctt
  61 caattcagtt gcagagtttt gatggagaga tatttgcagt tgatgtggaa attgccaaac
121 aatctgtgac tatcaagacc acgttggaag atttgggaat ggatgatgaa ggagatgacc
181 cagttcctct accaaatgtg aatgcagcag tattaaaaaa ggtcattcag tggtgcaccc
241 accacaagga tgaccctcct ccccctgaag atgatgagaa caaagaaaag caaacagacg
301 atatccctgt ttgggaccaa gaattcctga aagttgctca aggaacactt tttgaactca
361 ttcgggctgc aaactactta gacatcaaag gtttgcttga tgttacatgc aagactgttg
421 ccaatatgat caaggggaaa actcctgagg agattcgcaa gacattcaat atcaaaaatg
481 actttactga agaggaggaa gcccaggtac gcaaagagaa ccagtggtgt gaagagaagt
541 gaaatgttgt gcctgacact gtaacactgt aaggat
(SEQ ID NO:241)
    1 [sequence omitted]
```

[0715] Putative function
[0716] Cell cycle protein, ubiquitin ligase

### Example 24

### Category 3

[0717] Line ID—186

[0718] Phenotype—Lethal phase larval stage 3. Small brain, high mitotic index, rod-like overcondensed chromosomes, fewer ana- and telophases.

[0719] Annotated Drosophila genome genomic segment containing P element insertion site (and map position)—AE003494 (12C6-7)

[0720] P element insertion site—123,540

[0721] Annotated Drosophila genome Complete Genome candidate

[0722] CG18319—bendless ubiquitin conjugating enzyme

(SEQ ID NO:242)

TTAGTCACAGCAACGCACACACACACTACCAAACGGCTACATTTTTTTTC
GAGTGTGTTCGACATTCATAATTTTTGTGGTGGAGCTGCCTGCAAAATCG
AATTTTATCAGTTTGCCAACGAAGTTATCGGCCATAACTGCAAATAAAGT
TCAGCAATAACTTGGCGCTGTTACGATCTCAACGAGAAGGTCCAGACTCA
ACCCGCGTTTCCAGTTCACCGCGTAAAAGGAACCAGCTAAACGATGTCCA
GCCTGCCACGTCGCATCATCAAGGAGACTCAACGTTTGATGCAGGAGCCA
GTGCCTGGGATCAATGCCATTCCCGATGAGAACAATGCCCGTTACTTCCA
TGTGATCGTGACCGGACCGAACGATTCGCCCTTCGAGGGCGGCGTGTTCA
AGCTGGAGCTGTTCCTACCGGAGGACTATCCAATGTCAGCGCCCAAAGTG
CGCTTCATCACGAAGATCTACCATCCGAACATCGATCGTTTGGGCCGCAT
TTGCCTCGACGTGCTGAAGGACAAGTGGAGTCCAGCCCTGCAGATCCGGA
CCATATTGCTATCCATTCAGGCACTGCTCAGTGCACCCAATCCCGACGAT
CCGCTGGCCAACGATGTGGCTGAGTTGTGGAAGGTCAACGAGGCGGAGGC
CATTCGCAATGCCCGCGAGTGGACCCAGAAATATGCCGTCGAAGACTGAA
CGCCCGAGGTCAGGAGGAAAGTCAGAAAGCGGATCCGTCAGTTGTATCGG
CGTTTTTCCAGAAAGTGGGTGCGTGACATGAACGGGCGGGTGGGTAAATT
GAATACTTTAAAAGCAACCAGAAAAACCTAAAACATACGAAAGAAAACAT
AAAATAAGAAAAAAGTAAGGAAGCAAACATAAAAAAAAACGATTTAAGAA
CACATTTTTTTTTCGAACCTTCTGGGGCGGGATATACATATAAAATATTA
ATATATATATTTTTTTCAACCAATCGATCGGGGCGATCGGCGAAATGGAG
GAGAGATAGCGAAAGCATTCTTTATGTAAGACGTATACATGTATCCGAAA
CAAACTAAAAACGAAAAAAAAAAAAAAAAAAAAAAACAGTAATTGGTTTT
AGTCGTTTCTATTGATTTGTTCGAGGGTTCTGGTGTCTATATACATATAG
CCGTATATAATTCTATGTGTAACTGAAATAACCAACCCATAACCATTAAC
ACATGTAGCATCAGATATGATAAATCAATTGGAAAGGCAAACAAGAAGGG
ATTTTGATTTCCTTTAACTCGTCATTTGAAAACTCGGCTTAAATGTCAAT
TCAAAATAGAGAATTTTGATTGTATCATTTTCAGTGTTTCAGAAAATTTA
AGATGTGATCGTCCAACTTGTAGACTTTACTTTTCTTAACTAAGAGTTCA
CCATTTCGATTGATACTTGAGCTTTGCCTGGGTTGTGTCAGAGTCCCTTT
GATAAACGATAAATAGTTTTTACTCGAAAACAATTTTTTTTAACCAAACA
ATGAAGCCTTTAAGCTATTAGTAATTTTTGAAAAAAAAAAAAATAAAAAA
TATATATATAAAAAATATACAAAAATATGATACATGATCAAAATACAATG
AATGCATACACTATATATTTATACAAAAAAAATACAAAAAGAAAAACAAA
AGTAGTGGCTTGATTGCGTGAAAATTTCAAGTGCAGTTCTCAACAAAAAT
TGTGTACAGTAATTAAATGTTTGTCACCGAAATCACTAAAGGATAATCCA
AAAAACAATAGCAACCGAAAAGCAACCATAAATCAAAGAGTAAGCGAAAA
TAAAAATTCAGTTTTCTTTAATTTTAATTAATTTTTTTCTAAGAAAAATA
AATAAAAACGAAAAATTCAAAT

(SEQ ID NO:243)

MSSLPRRIIKETQRLMQEPVPGINAIPDENNARYFHVIVTGPNDSPFEGG
VFKLELFLPEDYPMSAPKVRFITKIYHPNIDRLGRICLDVLKDKWSPALQ
IRTILLSIQALLSAPNPDDPLANDVAELWKVNEAEAIRNAREWTQKY
AVED

[0723] Human homologue of Complete Genome candidate

[0724] BAA11675—ubiquitin-conjugating enzyme E2 UbcH-ben

```
(SEQ ID NO:244)
      1 actcgtgcgt gaggegagag gagccggaga cgagaccaga ggccgaactc gggttctgac
    61 aagatggccg ggctgccccg caggatcatc aaggaaaccc agcgtttgct ggcagaacca
  121 gttcctggca tcaaagccga accagatgag agcaacgccc gttattttca tgtggtcatt
  181 gctggccctc aggattcccc ctttgaggga gggactttta aacttgaact attccttcca
  241 gaagaatacc caatggcagc ccctaaagta cgtttcatga ccaaaattta tcatcctaat
  301 gtagacaagt tgggaagaat atgtttagat attttgaaag ataagtggtc cccagcactg
  361 cagatccgca cagttctgct atcgatccag gccttgttaa gtgctcccaa tccagatgat
  421 ccattagcaa atgatgtagc ggagcagtgg aagaccaacg aagcccaagc catagaaaca
  481 gctagagcat ggactaggct atatgccatg aataatattt aaattgatac gatcatcaag
  541 tgtgcatcac ttctcctgtt ctgccaagac ttcctcctct ttgtttgcat ttaatggaca
  601 cagtcttaga aacattacag aataaaaaag cccagacatc ttcagtcctt tggtgattaa
  661 atgcacatta gcaaatctat gtcttgtcct gattcactgt cataaagcat gagcagaggc
  721 tagaagtatc atctggattg ttgtgaaacg tttaaaagca gtggcccctc cctgctttta
  781 ttcatttccc ccatcctggt ttaagtataa agcactgtga atgaaggtag ttgtcaggtt
  841 agctgcaggg gtgtgggtgt ttttatttta ttttatttta ttttattttt gaggggggag
  901 gtagtttaat tttatgggct cctttccccc ttttttggtg atctaattgc attggttaaa
  961 agcagctaac caggtcttta gaatatgctc tagccaagtc taactttatt tagacgctgt
1021 agatggacaa gcttgattgt tggaaccaaa atgggaacat taaacaaaca tcacagccct
1081 cactaataac attgctgtca agtgtagatt ccccccttca aaaaaagctt gtgaccattt
1141 tgtatggctt gtctggaaac ttctgtaaat cttatgtttt agtaaaatat tttttgttat
1201 tct
(SEQ ID NO:245)
      1 maglprriik etqrllaepv pgikaepdes naryfhvvia gpqdspfegg tfklelflpe
    61 eypmaapkvr fmtkiyhpnv dklgricldi lkdkwspalq irtvllsiqa llsapnpddp
  121 landvaeqwk tneaqaieta rawtrlyamn ni
```

[0725] Putative function
[0726] Ubiquitin conjugating enzyme

### Example 25

### Category 3

[0727] LineID—301

[0728] Phenotype—semilethal male and female, Low mitotic index, badly defined chromosomes, weak/uneven staining, fewer ana- and telophases

[0729] Annotated Drosophila genome genomic segment containing P element insertion site (and map position)—AE003422 (2B7-10)

[0730] P element insertion site—96,307

[0731] Annotated Drosophila genome Complete Genome candidate

[0732] CG14813—deltaCOP, component of cotamer involved in retrograde (golgi to ER) transport

(SEQ ID NO:246)

TCGCAGAACCGAACACGTCAGCTACGGGGATTGATTGTTAAACAACGTTT
CTATCGCCCCGCAAATCCGATCCGTAGCAGCAGTCCATCCTGCGCCGTCC
GCATCCGATCCGCGAAGTATTTTCCAGGGCAAAAACGTCAAACGCAGCAG
CAAAATGGTATTAATTGCTGCGGCTGTCTGCACGAAGAATGGCAAAGTGA
TTCTGTCACGTCAGTTCGTCGAGATGACGAAGGCACGCATCGAGGGACTG
CTGGCTGCCTTTCCCAAGCTGATGACTGCTGGCAAGCAGCACACTTACGT
GGAGACGGACTCCGTGCGCTACGTCTACCAGCCGATGGAGAAACTATATA
TGCTGCTCATCACCACTAAGGCCAGCAACATTCTGGAGGATCTGGAGACC
CTGCGCCTCTTCTCGAAAGTGATTCCCGAGTACAGCCACTCGCTCGACGA
GAAGGAGATTGTGGAGAATGCCTTCAATCTGATCTTCGCATTTGACGAGA
TCGTGGCACTCGGCTACAGGGAGAGCGTCAACTTGGCCCAGATCAAGACC
TTCGTGGAGATGGACTCACATGAGGAGAAGGTCTACCAGGCAGTGCGTCA
GACGCAGGAGCGTGATGCGCGCCAGAAGATGCGCGAGAAGGCCAAGGAAC
TGCAGCGGCAGCGCATGGAGGCCAGCAAACGGGGTGGTCCCTCCCTGGGT
GGCATTGGCAGCCGCAGCGGCGGCTTTAGCGCCGACGGAATTGGCAGTAG
CGGCGTGAGCAGCAGTTCCGGTGCCTCCAGCGCCAACACCGGCATCACCT
CCATCGATGTGGACACCAAATCCAAGGCGGCTGCCAGTAAACCAGCTTCC
CGCAATGCCCTCAAGCTAGGTGGCAAGTCCAAGGACGTCGATAGTTTCGT
GGATCAGCTGAAGAACGAGGGCGAGAAGATTGCCAATCTGGCACCGGCGG
CGCCCGCTGGAGGTTCCAGTGCTGCAGCTAGCGCCAGTGCAGCGGCCAAG
GCAGCTATCGCGTCGGACATTCACAAAGAGAGCGTACATCTGAAGATTGA
GGACAAGCTAGTAGTGCGTCTGGGACGCGATGGTGGCGTGCAGCAGTTCG
AGAACTCGGGCCTCCTGACGTTGCGCATTACGGACGAGGCCTACGGACGC
ATTTTGCTGAAGCTGTCTCCCAACCACACACAGGGCCTGCAGTTGCAGAC
CCACCCCAACGTGGACAAGGAGCTGTTCAAGTCGCGCACTACCATCGGAC
TAAAGAACTTGGGCAAGCCGTTTCCCCTTAACACCGATGTGGGTGTGCTC
AAGTGGCGCTTCGTCTCGCAGGACGAGTCGGCAGTCCCGCTGACCATTAA
CTGCTGGCCATCGGATAATGGAGAGGGTGGATGCGATGTTAACATTGAGT
ATGAACTGGAGGCGCAGCAGCTAGAGCTGCAGGACGTGGCCATTGTCATT
CCCTTGCCAATGAATGTGCAGCCTTCGGTGGCGGAGTACGACGGCACCTA
CAACTACGATTCACGCAAGCATGTGCTCCAGTGGCACATTCCAATAATCG
ATGCCGCCAACAAGTCCGGTTCTATGGAGTTCAGCTGCAGTGCCTCCATT
CCCGGTGACTTCTTCCCCTTGCAGGTGTCCTTCGTCTCGAAAACGCCGTA
TGCGGGCGTCGTGGCCCAGGATGTGGTGCAGGTGGACAGCGAGGCGGCGG
TCAAGTATTCAAGCGAGTCCATTCTGTTCGTGGAAAAGTACGAGATCGTG
TAGGCCGCGCCGCTGGCCACGCCCACCTAAGTAGTACATAAATATACATA
ATTTCCCGGGGTCATCCGATGCGATGCAATTAATTCAACTGCTGCAGCAT
GTTGAGAATTATTTTTCCATGTGCGAACTTTACATATTTATGGCGCAGAC
AGCTTCTCAGAGCGAGTAATTGATTCC

(SEQ ID NO:247)

MVLIAAAVCTKNGKVILSRQFVEMTKARIEGLLAAFPKLMTAGKQHTYVE
TDSVRYVYQPMEKLYMLLITTKASNILEDLETLRLFSKVIPEYSHSLDEK
EIVENAFNLIFAFDEIVALGYRESVNLAQIKTFVEMDSHEEKVYQAVRQT
QERDARQKMREKAKELQRQRMEASKRGGPSLGGIGSRSGGFSADGIGSSG
VSSSSGASSANTGITSIDVDTKSKAAASKPASRNALKLGGKSKDVDSFVD
QLKNEGEKIANLAPAAPAGGSSAAASASAAAKAAIASDIHKESVHLKIED
KLVVRLGRDGGVQQFENSGLLTLRITDEAYGRILLKLSPNHTQGLQLQTH
PNVDKELFKSRTTIGLKNLGKPFPLNTDVGVLKWRFVSQDESAVPLTINC
WPSDNGEGGCDVNIEYELEAQQLELQDVAIVIPLPMNVQPSVAEYDGTYN
YDSRKHVLQWHIPIIDAANKSGSMEFSCSASLPGDFFPLQVSFVSKTPYA
GVVAQDVVQVDSEAAVKYSSESILFVEKYEIV

[0733] Human homologue of Complete Genome candidate

[0734] CAA57071—archain, possible role in vesicle structure or trafficking

```
(SEQ ID NO:248)
      1 cgggcggttc ctgtcaaggg ggcagcaggt ccagagctgc tggtgctccc gttccccaga
    61 ccctacccct atccccagtg gagccggagt gcggcgcgcc ccaccaccgc cctcaccatg
  121 gtgctgttgg cagcagcggt ctgcacaaaa gcaggaaagg ctattgtttc tcgacagttt
  181 gtggaaatga cccgaactcg gattgagggc ttattagcag cttttccaaa gctcatgaac
  241 actggaaaac aacatacgtt tgttgaaaca gagagtgtaa gatatgtcta ccagcctatg
  301 gagaaactgt atatggtact gatcactacc aaaaacagca acattttaga agatttggag
  361 accctaaggc tcttctcaag agtgatccct gaatattgcc gagccttaga agagaatgaa
  421 atatctgagc actgttttga tttgattttt gcttttgatg aaattgtcgc actgggatac
  481 cgggagaatg ttaacttggc acagatcaga accttcacag aaatggattc tcatgaggag
  541 aaggtgttca gagccgtcag agagactcaa gaacgtgaag ctaaggctga gatgcgtcgt
  601 aaagcaaagg aattacaaca ggcccgaaga gatgcagaga gacagggcaa aaaagcacca
  661 ggatttggcg gatttggcag ctctgcagta tctggaggca gcacagctgc catgatcaca
  721 gagaccatca ttgaaactga taaaccaaaa gtggcacctg caccagccag gccttcaggc
  781 cccagcaagg ctttaaaact tggagccaaa ggaaaggaag tagataactt tgtggacaaa
  841 ttaaaatctg aaggtgaaac catcatgtcc tctagtatgg gcaagcgtac ttctgaagca
  901 accaaaatgc atgctccacc cattaatatg gaaagtgtac atatgaagat tgaagaaaag
  961 ataacattaa cctgtggacg agacggagga ttacagaata tggagttgca tggcatgatc
1021 atgcttagga tctcagatga caagtatggc cgaattcgtc ttcatgtgga aaatgaagat
1081 aagaaagggg tgcagctaca gacccateca aatgtggata aaaaactttt cactgcagag
1141 tctctaattg gcctgaagaa tccagagaag tcatttccag tcaacagtga cgtaggggtg
1201 ctaaagtgga gactacaaac cacagaggaa tcttttattc cactgacaat taattgctgg
1261 ccctcggaga gtggaaatgg ctgtgatgtc aacatagaat atgagctaca agaagataat
1321 ttagaactga atgatgtggt tatcaccatc ccactcccgt ctggtgtcgg cgcgcctgtt
1381 atcggtgaga tcgatgggga gtatcgacat gacagtcgac gaaataccct ggagtggtgc
1441 ctgcctgtga ttgatgccaa aaataagagt ggcagcctgg agtttagcat tgctgggcag
1501 cccaatgact tcttccctgt tcaagtttcc tttgtctcca agaaaaatta ctgtaacata
1561 caggttacca aagtgaccca ggtagatgga aacagccccg tcaggttttc cacagagace
1621 actttcctag tggataagta tgaaatcctg taataccaag aagagggagc tgaaaaggaa
1681 aattttcaga ttaataaaga agacgccaat gatggctgaa gagtttttcc cagatttaca
1741 agccactgga gacccctttt ttctgataca atgcacgatt ctctgcgcgc aaggaccctc
1801 gacteaccec catgtttcag tgtcacagag acattctttg ataaggaaat ggcacaaaca
1861 taaagggaaa ggctgctaat tttctttggc agattgtatt ggccagcagg aaagcaagct
1921 ctccagagaa tgcccccagt taaatacctc ctctaccttt acctaagttg ctcctttatt
1981 tttattttat aataataa
(SEQ ID NO:249)
      1 mvllaaavct kagkaivsrq fvemtrtrie gllaafpklm ntgkqhtfve tesvryvyqp
    61 meklymvlit tknsniledl etlrlfsrvi peycraleen eisehcfdli fafdeivalg
  121 yrenvnlaqi rtftemdshe ekvfravret qereakaemr rkakelqqar rdaerqgkka
  181 pgfggfgssa vsggstaami tetiietdkp kvapaparps gpskalklga kgkevdnfvd
  241 klksegetim sssmgkrtse atkmhappin mesvhmkiee kitltcgrdg glqnmelhgm
  301 imlrisddky grirlhvene dkkgvqlqth pnvdkklfta esliglknpe ksfpvnsdvg
  361 vlkwrlqtte esfipitinc wpsesgngcd vnieyelqed nlelndvvit iplpsgvgap
  421 vigeidgeyr hdsrrntlew clpvidaknk sgslefsiag qpndffpvqv sfvskknycn
  481 iqvtkvtqvd gnspvrfste ttflvdkyei l
```

[0735] Putative function
[0736] Role in vesicle trafficking

### Example 26

### Category 3

[0737] Line ID—148

[0738] Phenotype—Lethal phase pupal to pharate adult. Lagging chromosomes and bridges in ana- and telophase

[0739] Annotated Drosophila genome genomic segment containing P element insertion site (and map position)—AE003438 (6B-C)

[0740] P element insertion site—116,914

[0741] Annotated Drosophila genome Complete Genome candidate

[0742] CG8655—cdc7 kinase

(SEQ ID NO:250)

ATGCGTTATGACGCCTCCGCCGCTTTCGTGATGCCCTTCATGGCACATGA
CCGATTCCAGGACTTTTACACGCGCATGGATGTGCCCGAGATCCGGCAGT
ATATGCGCAATCTCCTGGTGGCACTGCGTCATGTCCACAAGTTCGATGTC
ATCCATCGCGACGTGAAGCCGAGCAACTTTCTCTACAATCGACGTCGGCG
AGAGTTTCTCCTCGTCGATTTCGGTCTGGCCCAGCATGTGAATCCTCCGG
CTGCGCGATCTTCCGGAAGTGCCGCCGCCATCGCCGCAGCCAACAACAAA
AACAACAACAATAATAACAATAATAATAGCAAACGGCCACGAGAGCGCGA
ATCAAAGGGGGATGTGCAGCAAATTGCGCTGGATGCTGGTTTGGGTGGAG
CAGTGAAGCGTATGCGTTTGCACGAGGAGTCCAACAAGATGCCCCTGAAA
CCGGTCAACGATATTGCGCCAAGCGATGCGCCGGAGCAGTCAGTAGATGG
GTCCAATCACGTCCAGCCACAGCTAGTGCAGCAAGAGCAGCAACAACTGC
AGCCGCAACAGCAGCAGCAACAACAGCAGCAGCAACAACAGTCGCAACAG
CAGCAGCAGCCGCAGCAGCAGTCGCAACAGCAGCACCCACAACGACAGCC
ACAACTGGCGCAGATGGATCAAACAGCATCGACGCCATCTGGCAGCAAGT
ACAATACGAATCGAAATGTCTCGGCAGCAGCGGCTAATAATGCCAAGTGC
GTTTGCTTTGCAAATCCCTCAGTTTGCCTCAACTGTCTGATGAAGAAGGA
GGTGCACGCCTCCAGGGCAGGAACACCTGGCTATCGGCCGCCCGAGGTTC
TGCTCAAGTACCCAGATCAGACCACTGCCGTGGACGTTTGGGCGGCGGGT
GTGATATTCCTTTCGATCATGTCAACGGTGTATCCGTTTTTCAAAGCGCC
CAACGATTTTATCGCGCTGGCCGAGATTGTAACAATATTTGGAGATCAGG
CGATACGGAAGACGGCCTTGGCTCTCGACCGTATGATCACCCTGAGCCAG
AGGTCCAGGCCACTGAATCTGCGAAAGTTGTGCCTGCGCTTTCGCTATCG
TTCCGTTTTTAGTGATGCCAAGCTCCTCAAGAGCTACGAATCTGTGGACG
GAAGCTGCGAAGTGTGCCGGAATTGTGATCAATACTTCTTCAACTGCCTA
TGCGAGGATAGCGATTACTTGACAGAGCCACTGGACGCATACGAATGTTT
TCCACCCAGCGCCTATGACCTACTGGATCGCCTGCTCGAGATTAATCCCC
ATAAACGAATTACCGCCGAAGAGGCACTAAAGCATCCATTCTTTACGGCC
GCCGAGGAGGCCGAGCAGACGGAGCAGGATCAGTTGGCCAATGGAACGCC
GCGCAAGATGCGTCGACAAAGATATCAAAGTCACAGAACGGTGGCCGCCT
CACAGGAGCAGGTCAAGCAGCAGGTTGCCCTTGATCTGCAGCAAGCGGCC
ATTAACAAGCTGTGA

(SEQ ID NO:251)

MRYDASAAFVMPFMAHDRFQDFYTRMDVPEIRQYMRNLLVALRHVHKFDV
IHRDVKPSNFLYNRRRREFLLVDFGLAQHVNPPAARSSGSAAAIAAANNK
NNNNNNNNNSKRPRERESKGDVQQIALDAGLGGAVKRMRLHEESNKMPLK
PVNDIAPSDAPEQSVDGSNHVQPQLVQQEQQQLQPQQQQQQQQQQQQSQQ
QQQPQQQSQQQHPQRQPQLAQMDQTASTPSGSKYNTNRNVSAAAANNAKC
VCFANPSVCLNCLMKKEVHASRAGTPGYRPPEVLLKYPDQTTAVDVWAAG
VIFLSIMSTVYPFFKAPNDFIALAEIVTIFGDQAIRKTALALDRMITLSQ
RSRPLNLRKLCLRFRYRSVFSDAKLLKSYESVDGSCEVCRNCDQYFFNCL
CEDSDYLTEPLDAYECFPPSAYDLLDRLLEINPHKRITAEEALKRPFFTA
AEEAEQTEQDQLANGTPRKMRRQRYQSHRTVAASQEQVKQQVALDLQQAA
INKL

[0743] Human homologue of Complete Genome candidate

[0744] AAB97512—HsCdc7

```
(SEQ lID NO:252)
      1 atggaggcgt ctttggggat tcagatggat gagccaatgg ctttttctcc ccagcgtgac
    61 cggtttcagg ctgaaggctc tttaaaaaaa aacgagcaga attttaaact tgcaggtgtt
  121 aaaaaagata ttgagaagct ttatgaagct gtaccacagc ttagtaatgt gtttaagatt
  181 gaggacaaaa ttggagaagg cactttcagc tctgtttatt tggccacagc acagttacaa
  241 gtaggacctg aagagaaaat tgctgtaaaa cacttgattc caacaagtca tcctataaga
  301 attgcagctg aacttcagtg cctaacagtg gctggggggc aagataatgt catgggagtt
  361 aaatactgct ttaggaagaa tgatcatgta gttattgcta tgccatatct ggagcatgag
  421 tcgtttttgg acattctgaa ttctctttcc tttcaagaag tacgggaata tatgcttaat
  481 ctgttcaaag ctttgaaacg cattcatcag tttggtattg ttcaccgtga tgttaagccc
  541 agcaattttt tatataatag gcgcctgaaa aagtatgcct tggtagactt tggtttggcc
  601 caaggaaccc atgatacgaa aatagagctt cttaaatttg tccagtctga agctcagcag
  661 gaaaggtgtt cacaaaacaa atcccacata atcacaggaa acaagattcc actgagtggc
  721 ccagtaccta aggagctgga tcagcagtcc accacaaaag cttctgttaa aagaccctac
  781 acaaatgcac aaattcagat taaacaagga aaagacggaa aggagggatc tgtaggcctt
  841 tctgtccagc gctctgtttt tggagaaaga aatttcaata tacacagctc catttcacat
  901 gagagccctg cagtgaaact catgaagcag tcaaagactg tggatgtact gtctagaaag
  961 ttagcaacaa aaaagaaggc tatttctacg aaagttatga atagtgctgt gatgaggaaa
1021 actgccagtt cttgcccagc tagcctgacc tgtgactgct atgcaacaga taaagtttgt
1081 agtatttgcc tttcaaggcg tcagcaggtt gcccctaggg caggtacacc aggattcaga
1141 gcaccagagg tcttgacaaa gtgccccaat caaactacag caattgacat gtggtctgca
1201 ggtgtcatat ttctttcttt gcttagtgga cgatatccat tttataaagc aagtgatgat
1261 ttaactgctt tggcccaaat tatgacaatt aggggatcca gagaaactat ccaagctgct
1321 aaaacttttg ggaaatcaat attatgtagc aaagaagttc cagcacaaga cttgagaaaa
1381 ctctgtgaga gactcagggg tatggattct agcactccca agttaacaag tgatatacag
1441 gggcatgctt ctcatcaacc agctatttca gagaagactg accataaagc ttcttgcctc
1501 gttcaaacac ctccaggaca atactcaggg aattcattta aaaaggggga tagtaatagc
1561 tgtgagcatt gttttgatga gtataatacc aatttagaag gctggaatga ggtacctgat
1621 gaagcttatg acctgcttga taaacttcta gatctaaatc cagcttcaag aataacagca
1681 gaagaagctt tgttgcatcc attttttaaa gatatgagct tgtga
(SEQ ID NO:253)
      1 measlgiqmd epmafspqrd rfqaegslkk neqnfklagv kkdieklyea vpqlsnvfki
    61 edkigegtfs svylataqlq vgpeekiavk hliptshpir iaaelqcltv aggqdnvmgv
  121 kycfrkndhv viampylehe sfldilnsls fqevreymln lfkalkrihq fgivhrdvkp
  181 snflynrrlk kyalvdfgla qgthdtkiel lkfvqseaqq ercsqnkshi itgnkiplsg
  241 pvpkeldqqs ttkasvkrpy tnaqiqikqg kdgkegsvgl svqrsvfger nfnihssish
  301 espavklmkq sktvdvlsrk latkkkaist kvmnsavmrk tasscpaslt cdcyatdkvc
  361 siclsrrqqv apragtpgfr apevltkcpn qttaidmwsa gviflsllsg rypfykasdd
  421 ltalaqimti rgsretiqaa ktfgksilcs kevpaqdlrk lcerlrgmds stpkltsdiq
  481 ghashqpais ektdhkascl vqtppgqysg nsfkkgdsns cehcfdeynt nlegwnevpd
  541 eaydlldkll dinpasrita eeallhpffk dmsl
```

[0745] Putative function
[0746] Protein kinase which regulates the G1/S phase transition and/or DNA replication in mammalian cells.

### Example 27

### Category 3

[0747] LineID—335

[0748] Phenotype—Lethal phase, pupal. Uneven chromosome condensation, lagging chromosomes in anaphase

[0749] Annotated Drosophila genome genomic segment containing P element insertion site (and map position)—AE003424 (3B1-2)

[0750] P element insertion site—286,560

[0751] Annotated Drosophila genome Complete Genome candidate

[0752] CG2621—shaggy, protein serine/threonine kinase

(SEQ ID NO:254)

ATGTTTACCTTCTACACCAATATAAATAATACACTGATCAACAACAACAA
TAATAATAATAATACTAGTAACAGTAATAATAATAATAACAACGTTATAA
GCCAGCCGATTAAAATACCGCTAACCGAGCGCTTCTCATCGCAAACATCG
ACGGGCTCGGCGGATAGCGGTGTAATTGTTTCCAGTGCATCGCAGCAGCA
ACTGCAGTTGCCACCACCACGCAGTAGCAGTGGATCGCTGAGTCTGCCAC
AAGCGCCACCTGGCGGCAAGTGGCGGCAGAAGCAGCAGCGCCAACAGTTG
CTGCTCAGCCAGGACAGCGGCATCGAAAATGGTGTCACCACTCGTCCATC
GAAAGCCAAGGACAACCAGGGTGCGGGAAAAGCCAGTCACAATGCCACAA
GCTCGAAGGAGAGCGGCGCGCAGTCGAACAGCAGCAGCGAGAGCCTGGGC
AGCAATTGCTCCGAGGCCCAGGAGCAGCAGAGAGTAAGAGCCTCCTCCGC
TCTGGAGCTCAGCAGCGTGGACACTCCCGTGATCGTCGGCGGTGTGGTCA
GTGGAGGCAACAGCATCTTGCGCAGCCGCATTAAGTACAAGAGTACGAAC
AGCACCGGAACCCAGGGATTCGATGTGGAGGATCGCATCGATGAGGTGGA
TATCTGTGATGATGATGATGTCGACTGCGATGATCGCGGATCGGAGATCG
AGGAGGAGGAGGAGGACCAAACCGAACAAGAGGAGGAGGTCGATGAGGTG
GATGCCAAGCCGAAGAACCGACTTTTGCCACCGGATCAGGCGGAACTCAC
AGTGGCGGCGGCCATGGCACGTCGACGCGATGCCAAGAGCCTGGCCACCG
ACGGTCACATATATTTCCCACTGCTCAAGATCAGCGAGGATCCGCACATT
GATTCGAAGCTGATCAATCGCAAGGATGGCCTCCAGGACACCATGTATTA
TTTGGACGAATTCGGCAGTCCAAAGTTGCGAGAGAAGTTCGCCCGCAAGC
AGAAGCAGCTGCTCGCCAAGCAGCAGAAGCAGTTGATGAAACGTGAAAGG
AGGAGCGAGGAGCAGCGCAAGAAGCGAAACACCACCGTGGCATCCAACTT
GGCGGCCAGCGGAGCGGTGGTGGACGACACCAAAGATGATTACAAACAAC
AACCACACTGTGATACTAGCTCTAGGAGCAAAAATAACTCGGTACCCAAT
CCACCCAGCAGCCATCTCCATCAGAACCACAATCATCTCGTTGTGGATGT
GCAAGAGGATGTGGATGATGTGAATGTGGTTGCCACCAGCGACGTGGACA
GTGGTGTCGTCAAGATGCGCCGCCATAGCCACGATAACCACTACGACCGA
ATTCCCCGGAGCAATGCTGCCACCATTACCACCCGCCCTCAAATCGACCA
ACAGTCGTCGCACCACCAGAACACCGAGGATGTGGAGCAAGGAGCTGAGC
CCCAAATCGATGGCGAAGCGGATCTGGATGCGGATGCGGATGCGGACAGC
GATGGGAGTGGCGAGAACGTTAAGACTGCCAAATTGGCCAGAACACAGTC
CTGCAAAAACCAAACAGGTCGCGATGGTTCTAAAATCACAACAGTTGTTG
CAACACCCGGCCAAGGCACCGATCGCGTACAAGAGGTCTCCTATACAGAC
ACAAAGGTCATCGGCAATGGCAGCTTCGGCGTCGTGTTCCAGGCAAAGCT
CTGCGATACCGGCGAACTGGTGGCAATCAAAAAAGTTTTACAAGACAGAC
GATTTAAGAATCGCGAATTGCAAATAATGCGCAAATTGGAGCATTGTAAT
ATTGTGAAGCTTTTGTACTTTTTCTATTCGAGTGGTGAAAAGCGTGATGA
AGTATTTTTGAATTTAGTCCTCGAATATATACCAGAAACCGTATACAAAG
TGGCTCGCCAATATGCCAAAACCAAGCAAACGATACCAATCAACTTTATT
CGGCTCTACATGTATCAACTGTTCAGAAGTTTGGCCTACATCCACTCGCT
GGGCATTTGCCATCGTGATATCAAGCCGCAGAATCTTCTGCTCGATCCGG
AGACGGCTGTGCTGAAGCTCTGTGACTTTGGCAGCGCCAAACAGCTGCTG
CACGGCGAGCCGAATGTATCGTATATCTGCTCCCGGTATTACCGCGCCCC
CGAGCTCATCTTTGGCGCCATCAATTATACAACAAAGATCGATGTCTGGA
GTGCCGGTTGCGTTTTGGCCGAACTGCTGCTGGGCCAGCCCATCTTCCCT
GGCGATTCCGGTGTGGATCAGCTCGTCGAGGTCATCAAGGTCCTGGGCAC
ACCGACAAGAGAACAGATACGCGAAATGAATCCAAACTACACGGAATTCA
AGTTCCCTCAGATTAAGAGTCATCCATGGCAGAAAGTTTTCCGTATACGC
ACTCCTACAGAAGCTATCAACTTGGTGTCCCTGCTGCTCGAGTATACGCC
CAGTGCCAGGATCACACCGCTCAAGGCCTGCGCACATCCGTTCTTCGATG
AGCTACGCATGGAGGGTAATCACACCTTGCCCAACGGTCGCGATATGCCG
CCGCTGTTCAACTTCACAGAGCATGAGCTCTCAATACAGCCCAGCCTAGT
GCCGCAGTTGTTGCCCAAGCATCTGCAGAACGCATCCGGACCTGGCGGCA
ATCGACCCTCGGCCGGCGGAGCAGCCTCCATTGCGGCCAGCGGCTCCACC
AGCGTCTCGTCAACGGGCAGTGGTGCCTCGGTGGAAGGATCCGCCCAGCC
ACAGTCGCAGGGTACAGCAGCAGCTGCGGGATCCGGATCGGGCGGAGCAA
CAGCAGGAACCGGCGGAGCGAGTGCCGGTGGACCCGGATCTGGTAACAAC
AGTAGCAGCGGCGGAGCATCGGGAGCGCCGTCCGCTGTGGCTGCCGGAGG
AGCCAATGCCGCCGTCGCTGGCGGTGCTGGTGGTGGTGGCGGAGCCGGTG
CGGCGACCGCAGCTGCAACAGCAACTGGCGCTATAGGCGCGACTAATGCC
GGCGGCGCCAATGTAACAGATTCATAGGGGAAATAGTAACATACATACAC
ACACTAAATATATATCCAAGCATATATATATAGTAATCATTATATATAAC
ACCTACACCCACAACAACAACAACAGCAATTATATATAATAACCATAAAC
AAGAATGGAGAAAGCCAATCCAGCAATCACAGCAAACTATATACACAACA
ACAACAATTAAATTAATTAATGCAATTGATGAAAGAACAGCAGCAGCAGC
AGCAGCAGCAGCAGCAGCAGCATCAACCGCAATTTCAAAAGAACTCTAGA
AACAGCAAAGGCATAAAATATAACAAAAGAAATATTTTACTTAGGTAAAA
CATTAAATTTATTTTAAATCTAAAATAAACTAATAAGCATTAAATAATAC
ATGATAATGGTAAATAAACACACAATAATTATAATAGTAGAGCGAGCGCT
GATCGATTGTCATTTTATTGCTGCCGC

(SEQ ID NO:255)

MFTFYTNINNTLINNNNNNNNTSNSNNNNNNVISQPIKIPLTERFSSQTS
TGSADSGVIVSSASQQQLQLPPPRSSSGSLSLPQAPPGGKWRQKQQRQQL
LLSQDSGIENGVTTRPSKAKDNQGAGKASHNATSSRESGAQSNSSSESLG
SNCSEAQEQQRVRASSALELSSVDTPVIVGGVVSGGNSILRSRIKYKSTN
STGTQGFDVEDRIDEVDICDDDDVDCDDRGSEIEEEEEDQTEQEEEVDEV
DAKPKNRLLPPDQAELTVAAAMARRRDAKSLATDGHIYFPLLKISEDPHI
DSKLINRKDGLQDTMYYLDEFGSPKLREKFARKQKQLLAKQQKQLMKRER
RSEEQRKKRNTTVASNLAASGAVVDDTKDDYKQQPHCDTSSRSKNNSVPN
PPSSHLHQNHNHLVVDVQEDVDDVNVVATSDVDSGVVKMRRHSHDNHYDR
IPRSNAATITTRPQIDQQSSHHQNTEDVEQGAEPQIDGEADLDADADADS
DGSGENVKTAKLARTQSCKNQTGRDGSKITTVVATPGQGTDRVQEVSYTD
TKVIGNGSFGVVFQAKLCDTGELVAIKKVLQDRRFKNRELQIMRKLEHCN
IVKLLYFFYSSGEKRDEVFLNLVLEYIPETVYKVARQYAKTKQTIPINFI
RLYMYQLFRSLAYIHSLGICHRDIKPQNLLLDPETAVLKLCDFGSAKQLL
HGEPNVSYICSRYYRAPELIFGAINYTTKJDVWSAGCVLAELLLGQPIFP
GDSGVDQLVEVIKVLGTPTREQIREMNPNYTEFKFPQIKSHPWQKVFRIR
TPTEAINLVSLLLEYTPSARITPLKACAHPFFDELRMEGNHTLPNGRDMP
PLFNFTEHELSLQPSLVPQLLPKHLQNASGPGGNRPSAGGAASIAASGST
SVSSTGSGASVEGSAQPQSQGTAAAAGSGSGGATAGTGGASAGGPGSGNN
SSSGGASGAPSAVAAGGANAAVAGGAGGGGGAGAATAAATATGAIGATNA
GGANVTDS

[0753] Human homologue of Complete Genome candidate

[0754] NP_{—}002084—glycogen synthase kinase 3 beta

| | | |
|---|---|---|
| 1 | ggagaaggaa ggaaaaggtg attcgcgaag agagtgatca tgtcagggcg gcccagaacc | (SEQ ID NO:256) |
| 61 | acctcctttg cggagagctg caagccggtg cagcagcctt cagcttttgg cagcatgaaa | |
| 121 | gttagcagag acaaggacgg cagcaaggtg acaacagtgg tggcaactcc tgggcagggt | |
| 181 | ccagacaggc cacaagaagt cagctataca gacactaaag tgattggaaa tggatcattt | |
| 241 | ggtgtggtat atcaagccaa actttgtgat tcaggagaac tggtcgccat caagaaagta | |
| 301 | ttgcaggaca agagatttaa gaatcgagag ctccagatca tgagaaagct agatcactgt | |
| 361 | aacatagtcc gattgcgtta tttcttctac tccagtggtg agaagaaaga tgaggtctat | |
| 421 | cttaatctgg tgctggacta tgttccggaa acagtataca gagttgccag acactatagt | |
| 481 | cgagccaaac agacgctccc tgtgatttat gtcaagttgt atatgtatca gctgttccga | |
| 541 | agtttagcct atatccattc ctttggaatc tgccatcggg atattaaacc gcagaacctc | |
| 601 | ttgttggatc ctgatactgc tgtattaaaa ctctgtgact ttggaagtgc aaagcagctg | |
| 661 | gtccgaggag aacccaatgt ttcgtatatc tgttctcggt actatagggc accagagttg | |
| 721 | atctttggag ccactgatta tacctctagt atagatgtat ggtctgctgg ctgtgtgttg | |
| 781 | gctgagctgt tactaggaca accaatattt ccaggggata gtggtgtgga tcagttggta | |
| 841 | gaaataatca aggtcctggg aactccaaca agggagcaaa tcagagaaat gaacccaaac | |
| 901 | tacacagaat ttaaattccc tcaaattaag gcacatcctt ggactaaggt cttccgaccc | |
| 961 | cgaactccac cggaggcaat tgcactgtgt agccgtctgc tggagtatac accaactgcc | |
| 1021 | cgactaacac cactggaagc ttgtgcacat tcattttttg atgaattacg ggacccaaat | |
| 1081 | gtcaaacatc caaatgggcg agacacacct gcactcttca acttcaccac tcaagaactg | |
| 1141 | tcaagtaatc cacctctggc taccatcctt attcctcctc atgctcggat tcaagcagct | |
| 1201 | gcttcaaccc ccacaaatgc cacagcagcg tcagatgcta atactggaga ccgtggacag | |
| 1261 | accaataatg ctgcttctgc atcagcttcc aactccacct gaacagtccc gacgagccag | |
| 1321 | ctgcacagga aaaaccacca gttacttgag tgtcactcag caacactggt cacgtttgga | |
| 1381 | aagaatatt | |
| 1 | msgrprttsf aesckpvqqp safgsmkvsr dkdgskvttv vatpgqgpdr pqevsytdtk | (SEQ ID NO:257) |
| 61 | vigngsfgvv yqaklcdsge lvaikkvlqd krfknrelqi mrkldhcniv rlryffyssg | |
| 121 | ekkdevylnl vldyvpetvy rvarhysrak qtlpviyvkl ymyqlfrsla yihsfgichr | |
| 181 | dikpqnllld pdtavlklcd fgsakqlvrg epnvsyicsr yyrapelifg atdytssidv | |
| 241 | wsagcvlael llgqpifpgd sgvdqlveii kvlgtptreq iremnpnyte fkfpqikahp | |
| 301 | wtkvfrprtp peaialcsrl leytptarlt pleacahsff delrdpnvkh pngrdtpalf | |
| 361 | nfttqelssn pplatilipp hariqaaast ptnataasda ntgdrgqtnn aasasasnst | |
| 421 | | |

[0755] Putative function
[0756] Serine/threonine kinase involved in winglwess signaling pathway

### Example 28

### Category 3

[0757] Dlg1 (CG1725) as a candidate gene is detected in a screen of a P-element insertion library covering the X chromosome of Drosophila melanogaster (Peter et al. 2001) as mutant phenotype in fly line 342, as described above.

[0758] Mitotic defects are observed in brain squashes: high mitotic index, overcondensed chromosomes, lagging chromosomes and a high proportion of anaphases and telophases compared to normal brains.

[0759] Rescue and sequencing of genomic DNA flanking the P-element insertion site indicates that the P-element is inserted into the 5′ region of gene Dlg1 (CG1725).

[0760] LineID—342

[0761] Phenotype—Lethal phase pupal. Higher mitotic index, colchicine-like overcondensed chromosomes, many ana- and telophases, lagging chromosomes

[0762] Annotated Drosophila genome genomic segment containing P element insertion site (and map position)—AE003486 (10B8-10)

[0763] P element insertion site—1128 and 3755

[0764] Annotated Drosophila genome Complete Genome candidate

[0765] CG1725—dig, membrane-associated guanylate kinase homologs, role in cell junctions and proliferation (version 1)

| | |
|---|---|
| CACAAACAACACGCTCGTGCGTGCGATTTAAATATATAGATGTTTCAAAA | (SEQ ID NO:258) |
| GTCAACCTCTCTGTTCGCAATTGTGTGCATTTTCGTTTGTCTAGTGCAAA | |
| AAGTTGGATAATCACAGGCGGCAAATAAAATAGTAACGAATCGAGTTCAA | |
| GAAGAAGAAGAAGAGAAGAGGAAGCAGAGGCAGCAGCGCCGGCATTTGTC | |
| CGTGTGTTGTTGTTGTTGTTTGTGCGCGGCTGTAACTTTAACCCTCGAAC | |
| GCCATAAGATTAAAAAACCAAGTATAACAATAAGTTATAAAATCAATTAA | |
| ACAAAAGCCGCTGCGATATGACAACGAGGAAAAAGAAGCGCGACGGCGGC | |
| GGCAGCGGCGGCGGATTCATCAAGAAAGTTTCGTCACTCTTCAATCTGGA | |
| TTCGGTGAATGGCGATGATAGCTGGTTATACGAGGACATTCAGCTGGAGC | |
| GCGGCAACTCCGGATTGGGCTTTTCCATTGCCGGCGGTACGGATAATCCG | |
| CACATCGGCACCGACACCTCCATCTACATCACCAAGCTCATTTCCGGTGG | |
| AGCAGCTGCCGCCGATGGACGTCTGAGCATCAACGATATCATCGTATCGG | |
| TGAACGATGTGTCCGTGGTGGATGTGCCACATGCCTCCGCCGTGGATGCC | |
| CTCAAGAAGGCGGGCAATGTTGTTAAGCTGCATGTGAAGCGAAAACGTGG | |
| AACGGCCACCACCCCGGCAGCGGGATCGGCGGCAGGAGATGCTCGGGATA | |
| GTGCGGCCAGCGGACCGAAGGTCATCGAAATCGATCTGGTCAAGGGCGGC | |
| AAGGGACTGGGCTTCTCAATTGCCGGCGGCATTGGCAACCAGCACATCCC | |
| CGGCGACAATGGCATCTATGTGACCAAGTTGATGGACGGCGGAGCAGCGC | |
| AGGTGGACGGACGTCTCTCCATCGGAGATAAGCTGATTGCAGTGCGCACC | |
| AACGGGAGCGAGAAGAACCTGGAGAACGTAACGCACGAACTGGCGGTGGC | |
| CACGTTGAAATCGATCACCGACAAGGTGACGCTGATCATTGGAAAGACAC | |
| AGCATCTGACCACCAGTGCGTCCGGCGGCGGAGGAGGAGGCCTTTCATCC | |
| GGACAACAATTGTCGCAGTCCCAATCGCAGTTGGCCACCAGCCAGAGCCA | |
| AAGTCAGGTGCATCAGCAGCAGCATGCGACGCCGATGGTCAATTCGCAGT | |
| CGACAGGTGCGCTAAATAGTATGGGACAGACGGTTGTCGATTCACCATCA | |
| ATACCACAAGCAGCCGCAGCAGTAGCAGCAGCAGCAAATGCATCTGCATC | |
| TGCATCAGTCATTGCAAGCAACAACACAATCAGCAACACCACAGTCACCA | |
| CAGTCACGGCCACGGCCACAGCCAGCAACAGTAGCAGCAAGTTGCCGCCG | |
| TCGCTTGGCGCTAACAGCAGCATTAGCATTAGCAATAGCAATAGCAATAG | |
| CAACAGCAATAATATCAACAACATTAATAGCATCAACAACAACAACAGTA | |
| GCAGCAGCAGCACGACGGCAACTGTTGCAGCAGCAACACCAACAGCAGCA | |
| TCAGCAGCAGCAGCAGCAGCATCATCTCCACCCGCCAACTCCTTCTATAA | |
| CAATGCTTCCATGCCCGCCCTGCCTGTCGAATCCAATCAAACAAACAACC | |
| GATCCCAATCACCCCAGCCGCGCCAGCCCGGGTCGCGATACGCCTCTACA | |
| AATGTCCTAGCCGCCGTTCCACCAGGAACTCCACGCGCTGTCAGCACCGA | |
| GGATATAACCAGAGAACCGCGCACCATCACCATCCAGAAGGGACCGCAGG | |
| GCCTGGGCTTCAATATCGTTGGCGGCGAGGATGGCCAGGGTATCTATGTG | |
| TCCTTCATCCTGGCCGGCGGCCCAGCGGATCTCGGGTCGGAGTTGAAGCG | |
| TGGCGACCAGCTGCTCAGCGTGAACAATGTCAATCTCACGCACGCCACCC | |
| ACGAAGAGGCAGCCCAGGCGCTCAAGACTTCTGGCGGTGTGGTGACCCTG | |
| TTGGCGCAGTACCGCCCAGAGGAGTACAATCGCTTCGAGGCACGCATTCA | |
| AGAGTTGAAACAACAGGCTGCCCTCGGTGCCGGCGGATCGGGAACGCTGC | |
| TGCGCACCACGCAAAAGCGATCGCTGTATGTGCGCGCCCTGTTTGACTAC | |
| GATCCGAATCGGGATGATGGATTGCCCTCGCGAGGATTGCCCTTTAAGCA | |
| CGGCGATATCCTGCACGTGACCAATGCCTCCGACGATGAATGGTGGCAGG | |
| CACGACGAGTTCTCGGCGACAACGAGGACGAGCAAATCGGTATTGTACCA | |
| TCGAAAAGGCGTTGGGAGCGCAAAATGCGAGCTAGGGACCGCAGCGTTAA | |
| GTTCCAGGGACATGCGGCAGCTAATAATAATCTGGATAAGCAATCGACAT | |
| TGGATCGAAAGAAAAAGAATTTCACATTCTCGCGCAAATTTCCGTTTATG | |
| AAGAGTCGCGATGAGAAGAATGAAGATGGCAGCGACCAAGAGCCCAATGG | |
| AGTTGTGAGCAGCACCAGCGAGATTGACATCAATAATGTCAACAACAACC | |
| AGTCAAATGAACCGCAACCTTCCGAGGAGAACGTGTTGTCCTACGAGGCC | |
| GTACAGCGTTTGTCCATCAACTACACGCGCCCGGTGATTATTCTGGGACC | |
| CCTGAAGGATCGCATCAACGATGACCTTATATCAGAGTATCCCGACAAGT | |
| TCGGCTCTTGTGTGCCACACACCACCCGACCCAAGCGAGAGTACGAGGTG | |
| GATGGTAGGGACTACCACTTTGTATCCTCTCGCGAGCAAATGGAACGGGA | |
| TATTCAGAATCATCTGTTCATCGAGGCGGGACAGTATAACGACAATCTGT | |
| ACGGCACATCGGTGGCCAGCGTGCGCGAAGTGGCCGAGAAGGGTAAACAC | |
| TGCATCCTGGACGTGTCCGGGAACGCCATCAAGCGACTCCAAGTTGCCCA | |
| GCTGTATCCCGTCGCCGTGTTCATCAAGCCCAAGTCGGTGGATTCAGTGA | |
| TGGAAATGAATCGTCGCATGACGGAGGAGCAGGCCAAGAAGACTTACGAG | |
| CGGGCGATTAAAATGGAGCAAGAATTCGGCGAATACTTTACGGGCGTTGT | |
| CCAAGGCGATACCATCGAGGAGATTTACAGCAAAGTGAAATCGATGATTT | |
| GGTCCCAGTCGGGACCAACCATTTGGGTACCTTCCAAGGAATCTCTATGA | |
| CCAACAGCCACCACAACTTGGACACTGCCGCCTCGAGTTCGATGTCGACC | |
| AGTCTCGAGAACAACAATAGGAGCAACAGCAGCAGCAACAAATCAGCAGC | |
| CGCAGCAGAAGACGCCGCACTGATGATGCATCACAGTAACAACAGATACT | |
| AATACAACTACAACAACAACAAGAACAACAACAACAACAGCAACCACAGC | |
| AGCAGCCACAGCGACAACAACAAAAACAACAACACTGACAACGACAGGAA | |
| ACGG | |
| MTTRKKKRDGGGSGGGFIKKVSSLFNLDSVNGDDSWLYEDIQLERGNSGLGFSIAGGTD | (SEQ ID NO:259) |
| NPHIGTDTSIYITKLISGGAAAADGRLSINDIIVSVNDVSVVDVPHASAVDALKKAGNVV | |
| KLHVKRKRGTATTPAAGSAAGDARDSAASGPKVIEIDLVKGGKGLGFSIAGGIGNQHLP | |
| GDNGIYVTKLTDGGRAQVDGRLSIGDKLIAVRTNGSEKNLENVTHELAVATLKSITDKV | |
| TLIIGKTQHLTTSASGGGGGGLSSGQQLSQSQSQLATSQSQSQVHQQQHATPMVNSQST | |
| GALNSMGQTVVDSPSIPQAAAAVAAAANASASASVIASNNTISNTTVTTVTATATASND | |
| SSKLPPSLGANSSISISNSNSNSNSNNINNINSINNNNSSSSSTTATVAAATPTAASAAAAA | |
| ASSPPANSFYNNASMPALPVESNQTNNRSQSPQPRQPGSRYASTNVLAAVPPGTPRAVS | |
| TEDITREPRTITIQKGPQGLGFNIVGGEDGQGIYVSFILAGGPADLGSELKRGDQLLSVNN | |
| VNLTHATHEEAAQALKTSGGVVTLLAQYRPEEYNRFEARIQELKQQAALGAGGSGTLL | |
| RTTQKRSLYVRALFDYDPNRDDGLPSRGLPFKHGDILHVTNASDDEWWQARRVLGDN | |
| EDEQIGIVPSKRRWERKMRARDRSVKFQGHAAANNNLDKQSTLDRKKKNFTFSRKFPF | |
| MKSRDEKNEDGSDQEPNGVVSSTSEIDINNVNNNQSNEPQPSEENVLSYEAVQRLSINYT | |
| RPVIILGPLKDRINDDLISEYPDKFGSCVPHTTRPKREYEVDGRDYHFVSSREQMERDIQN | |
| HLFIEAGQYNDNLYGTSVASVREVAEKGKHCILDVSGNAIKRLQVAQLYPVAVFIKPKS | |
| VDSVMEMNRRMTEEQAKKTYERAIKMEQEFGEYFTGVVQGDTIEEIYSKVKSMIWSQS | |
| GPTIWVPSKESL | |

[0766] CG1725—dlg, membrane-associated guanylate kinase homologs, role in cell junctions and proliferation, genbank accession number M73529 (version 2)

| | | | | | | | |
|---|---|---|---|---|---|---|---|
| 1 | cccccccccc | cccagttggg | tgtgttgttt | tcgtcgcgtt | cggttgctcg | ctttattttt | (SEQ ID NO:260) |
| 61 | ttgtttgttt | attttgtttt | gtgcaatgga | aatgtgaaca | caaatgtttc | aaaagtcaac | |
| 121 | ctctctgttc | gcaattgtgt | gcattttcgt | ttgtctagtg | caaaaagttg | gataacacag | |
| 181 | gcggcaaata | aaatagtaac | gaatcgagtt | caagaagaag | aagaagagaa | gaggaagcag | |
| 241 | aggcagcagc | gccggcattt | gtccgtgtgt | tgttgttgtt | gtttgtgcgc | ggctgtaact | |
| 301 | ttaaccctcg | aacgccataa | gattaaaaaa | ccaactataa | caataagtta | taaaatcaat | |
| 361 | taaacaaaag | ccgctgcgat | atgacaacga | ggaaaaagaa | gcgcgacggc | ggcggcagcg | |
| 421 | gcggcggatt | catcaagaaa | gtttcgtcac | tcttcaatct | ggattcggtg | aatggcgatg | |
| 481 | atagctggtt | atacgaggac | attcagctgg | agcgcggcaa | ctccggattg | ggcttttcca | |
| 541 | ttgccggcgg | tacggataat | ccgcacatcg | gcaccgacac | ctccatctac | atcaccaagc | |
| 601 | tcatttccgg | tggagcagct | gccgccgatg | gacgtctgag | catcaacgat | atcatcgtat | |
| 661 | cggtgaacga | tgtgtccgtg | gtggatgtgc | cacatgcctc | cgccgtggat | gccctcaaga | |
| 721 | aggcgggcaa | tgttgttaag | ctgcatgtga | agcgaaaacg | tggaacggcc | accaccccgg | |
| 781 | cagcgggatc | ggcggcagga | gatgctcggg | atagtgcggc | cagcggaccg | aaggtcatcg | |
| 841 | aaatcgatct | ggtcaagggc | ggcaagggac | tgggcttctc | aattgccggc | ggcattggca | |
| 901 | accagcacat | ccccggcgac | aatggcatct | atgtgaccaa | gttgacggac | ggcggacgag | |
| 961 | cgcaggtgga | cggacgtctc | tccatcggag | ataagctgat | tgcagtgcgc | accaacggga | |
| 1021 | gcgagaagaa | cctggagaac | gtaacgcacg | aactggcggt | ggccacgttg | aaatcgatca | |
| 1081 | ccgacaaggt | gacgctgatc | attggaaaga | cacagcatct | gaccaccagt | gcgtccggcg | |
| 1141 | gcggaggagg | aggcctttca | tccggacaac | aattgtcgca | gtcccaatcg | cagttggcca | |
| 1201 | ccagccagag | ccaaagtcag | gtgcatcagc | agcagcatgc | gacgccgatg | gtcaattcgc | |
| 1261 | agtcgacagg | tgcgctaaat | agtatgggac | agacggttgt | cgattcacca | tcaataccac | |
| 1321 | aagcagccgc | agcagtagca | gcagcagcaa | atgcatctgc | atctgcatca | gtcattgcaa | |
| 1381 | gcaacaacac | aatcagcaac | accacagtca | ccacagtcac | ggccacggcc | acagccagca | |
| 1442 | acgatagcag | caagttgccg | ccgtcgcttg | gcgctaacag | cagcattagc | attagcaata | |
| 1501 | gcaatagcaa | tagcaacagc | aataatatca | acaacattaa | tagcatcaac | aacaacaaca | |
| 1561 | gtagcagcag | cagcacgacg | gcaactgttg | cagcagcaac | accaacagca | gcatcagcag | |
| 1621 | cagcagcagc | agcatcatct | ccacccgcca | actccttcta | taacaatgct | tccatgcccg | |
| 1681 | ccctgcctgt | cgaatccaat | caaacaaaca | accgatccca | atcaccccag | ccgcgccagc | |
| 1741 | ccgggtcgcg | atacgcctct | acaaatgtcc | tagccgccgt | tccaccagga | actccacgcg | |
| 1801 | ctgtcagcac | cgaggatata | accagagaac | cacgcaccat | caccatccag | aagggaccgc | |
| 1861 | agggcctggg | cttcaatatc | gttggcggcg | aggatggcca | gggtatctat | gtgtccttca | |
| 1921 | tcctggccgg | cggcccagcg | gatctcgggt | cggagttgaa | gcgtggcgac | cagctgctca | |
| 1981 | gcgtgaacaa | tgtcaatctc | acgcacgcca | cccacgaaga | ggcagcccag | gcgctcaaga | |
| 2041 | cttctggcgg | tgtggtgacc | ctgttggcgc | agtaccgccc | agaggagtac | aatcgcttcg | |
| 2101 | aggcacgcat | tcaagagttg | aaacaacagg | ctgccctcgg | tgccggcgga | tcgggaacgc | |
| 2161 | tgctgcgcac | cacgcaaaag | cgatcgctgt | atgtgcgcgc | cctgtttgac | tacgatccga | |
| 2221 | atcgggatga | tggattgccc | tcgcgaggat | tgccctttaa | gcacggcgat | atcctgcacg | |
| 2281 | tgaccaatgc | ctccgacgat | gaatggtggc | aggcacgacg | agttctcggc | gacaacgagg | |
| 2341 | acgagcaaat | cggtattgta | ccatcgaaaa | ggcgttggga | gcgcaaaatg | cgagctaggg | |
| 2401 | accgcagcgt | taagttccag | ggacatgcgg | cagctaataa | taatctggat | aagcaatcga | |
| 2461 | cattggatcg | aaagaaaaag | aatttcacat | tctcgcgcaa | atttccgttt | atgaagagtc | |
| 2521 | gcgatgagaa | gaatgaagat | ggcagcgacc | aagagcccaa | tggagttgtg | agcagcacca | |
| 2581 | gcgagattga | catcaataat | gtcaacaaca | accagtcaaa | tgaaccgcaa | ccttccgagg | |
| 2641 | agaacgtgtt | gtcctacgag | gccgtacagc | gtttgtccat | caactacacg | cgcccggtga | |
| 2701 | ttattctggg | acccctgaag | gatcgcatca | acgatgacct | tatatcagag | tatcccgaca | |
| 2761 | agttcggctc | ctgtgtgcca | cacaccaccc | gacccaagcg | agagtacgag | gtggatggta | |
| 2821 | gggactacca | ctttgtatcc | tctcgcgagc | aaatggaacg | ggatattcag | aatcatctgt | |
| 2881 | tcatcgaggc | gggacagtat | aacgacaatc | tgtacggcac | atcggtggcc | agcgtgcgcg | |
| 2941 | aagtggccga | gaagggtaaa | cactgcatcc | tggacgtgtc | cgggaacgcc | atcaagcgac | |
| 3001 | tccaagttgc | ccagctgtat | cccgtcgccg | tgttcatcaa | gcccaagtcg | gtggattcag | |
| 3061 | tgatggaaat | gaatcgtcgc | atgacggagg | agcaggccaa | gaagacttac | gagcgggcga | |
| 3121 | ttaaaatgga | gcaagaattc | ggcgaatact | ttacgggcgt | tgtccagggc | gataccatcg | |
| 3181 | aggagatcta | cagcaaagtg | aaatcgatga | tttggtccca | gtcgggacca | accatttggg | |
| 3241 | taccttccaa | ggaatctcta | tga | | | | |

| | |
|---|---|
| MTTRKKKRDGGGSGGGFIKKVSSLFNLDSVNGDDSWLYEDIQLE | (SEQ ID NO:261) |
| RGNSGLGFSIAGGTDNPHIGTDTSIYITKLISGGAAAADGRLSINDIIVSVNDVSVVD | |
| VPHASAVDALKKAGNVVKLHVKRKRGTATTPAAGSAAGDARDSAASGPKVIEIDLVKG | |
| GKGLGFSIAGGIGNQHIPGDNGIYVTKLTDGGRAQVDGRLSIGDKLIAVRTNGSEKNL | |
| ENVTHELAVATLKSITDKVTLIIGKTQHLTTSASGGGGGGLSSGQQLSQSQSQLATSQ | |
| SQSQVHQQQHATPMVNSQSTGALNSMGQTVVDSPSIPQAAAAVAAAANASASASVIAS | |
| NNTISNTTVTTVTATATASNDSSKLPPSLGANSSISISNSNSNSNSNNINNINSINNN | |
| NSSSSSTTATVAAATPTAASAAAAAASSPPANSFYNNASMPALPVESNQTNNRSQSPQ | |
| PRQPGSRYASTNVLAAVPPGTPRAVSTEDITREPRTITIQKGPQGLGFNIVGGEDGQG | |
| IYVSFILAGGPADLGSELKRGDQLLSVNNVNLTHATHEEAAQALKTSGGVVTLLAQYR | |
| PEEYNRFEARIQELKQQAALGAGGSGTLLRTITQKRSLYVRALFDYDPNRDDGLPSRGL | |
| PFKHGDILHVTNASDDEWWQARRVLGDNEDEQIGIVPSKRRWERKMRARDRSVKFQGH | |
| AAANNNLDKQSTLDRKKKNFTFSRKFPFMKSRDEKNEDGSDQEPNGVVSSTSEIDINN | |
| VNNNQSNEPQPSEENVLSYEAVQRLSINYTRPVIILGPLKDRINDDLISEYPDKFGSC | |
| VPHTTRPKREYEVDGRDYHFVSSREQMERDIQNHLFIEAGQYNDNLYGTSVASVREVA | |
| EKGKHCILDVSGNAIKRLQVAQLYPVAVFIKIPKSVDSVMEMNRRMTEEQAKKTYERAI | |
| KMEQEFGEYFTGVVQGDTIEEIYSKVKSMIWSQSGPTIWVPSKESL | |

[0767] Human homologue of Complete Genome candidate

[0768] XP_{—}012060—discs, large (Drosophila) homolog 2, channel-associated protein of synapses-110′ (version 1)

| | | |
|---|---|---|
| 1 | gggaattctg gcctgggatt cagtattgct ggggggacag ataatcccca cattggagat | (SEQ ID NO:262) |
| 61 | gaccctggca tatttattac gaagattata ccaggaggtg ctgcagcaga ggatggcaga | |
| 121 | ctcagggtca atgattgtat cttgcgggtg aatgaggttg atgtgtcaga ggtttcccac | |
| 181 | agtaaagcgg tggaagccct gaaggaagca gggtctatcg ttcggctgta tgtgcgtaga | |
| 241 | agacgaccta ttttggagac cgttgtggaa atcaaactgt tcaaaggccc taaaggttta | |
| 301 | ggcttcagta ttgcaggagg tgtggggaac caacacattc ctggagacaa cagcatttat | |
| 361 | gtaactaaaa ttatagatgg aggagctgca caaaaagatg gaaggttgca agtaggagat | |
| 421 | agactactaa tggtaaacaa ctacagttta gaagaagtaa cacacgaaga ggcagtagca | |
| 481 | atattaaaga acacatcaga ggtagtttat ttaaaagttg gcaaacccac taccatttat | |
| 541 | atgactgatc cttatggtcc acctgatatt actcactctt attctccacc aatggaaaac | |
| 601 | catctactct ctggcaacaa tggcacttta gaatataaaa cctccctgcc acccatctct | |
| 661 | ccaggaaggt actcaccaat tccaaagcac atgcttgttg acgacgacta caccaggcct | |
| 721 | ccggaacctg tttacagcac tgtgaacaaa ctatgtgata agcctgcttc tcccaggcac | |
| 781 | tattcccctg ttgagtgtga caaaagcttc ctcctctcag ctccctattc ccactaccac | |
| 841 | ctaggcctgc tacctgactc tgagatgacc agtcattccc aacatagcac cgcaactcgt | |
| 901 | cagccttcaa tgactctcca acgggccgtc tccctggaag gagagcctcg caaggtagtc | |
| 961 | ctgcacaaag gctccactgg cctgggcttc aacattgtcg gtggggaaga tggagaaggt | |
| 1021 | atttttgtgt ccttcattct ggctggtgga ccagcagacc taagtgggga gctccagaga | |
| 1081 | ggagaccaga tcctatcggt gaatggcatt gacctccgtg gtgcatccca cgagcaggca | |
| 1141 | gctgctgcac taaagggggc tggacagaca gtgacgatta tagcacaata tcaacctgaa | |
| 1201 | gattacgctc gatttgaggc caaaatccat gacctacgag agcagatgat gaaccacagc | |
| 1261 | atgagctccg ggtccggatc cctgcgaacc aatcagaaac gctccctcta cgtcagagcc | |
| 1321 | atgttcgact acgacaagag caaggacagt gggctgccaa gtcaaggact tagttttaaa | |
| 1381 | tatggagata ttctccacgt tatcaatgcc tctgatgatg agtggtggca agccaggaga | |
| 1441 | gtcatgctgg agggagacag tgaggagatg ggggtcatcc ccagcaaaag gagggtggaa | |
| 1501 | agaaaggaac gtgcccgatt gaagacagtg aagtttaatg ccaaacctgg agtgattgat | |
| 1561 | tcgaaagggt cattcaatga caagcgtaaa aagagcttca tcttttcacg aaaattccca | |
| 1621 | ttctacaaga acaaggagca gagtgagcag gaaaccagtg atcctgaacg tggacaagaa | |
| 1681 | gacctcattc tttcctatga gcctgttaca aggcaggaaa taaactacac ccggccggtg | |
| 1741 | attatcctgg ggcccatgaa ggatcggatc aatgacgact tgatatctga attccctgat | |
| 1801 | aaatttggct cctgtgtgcc tcatactacg aggccaaagc gagactacga ggtggatggc | |
| 1861 | agagactatc actttgtcat ttccagagaa caaatggaga aagatatcca agagcacaag | |
| 1921 | tttatagaag ccggccagta caatgacaat ttatatggaa ccagtgtgca gtctgtgaga | |
| 1981 | tttgtagcag aaagaggcaa acactgtata cttgatgtat caggaaatgc tatcaagcgg | |
| 2041 | ttacaagttg cccagctcta tcccattgcc atcttcataa aacccaggtc tctggaacct | |
| 2101 | cttatggaga tgaataagcg tctaacagag gaacaagcca agaaaaccta tgatcgagca | |
| 2161 | attaagctag aacaagaatt tggagaatat tttacagcta ttgtccaagg agatacttta | |
| 2221 | gaagatatat ataaccaatg caagcttgtt attgaagagc aatctgggcc tttcatctgg | |
| 2281 | attccctcaa aggaaaagtt ataaattagc tactgcgcct ctgacaacga cagaagagca | |
| 2341 | tttagaagaa caaaatatat ataacatact acttggaggc ttttatgttt ttgttgcatt | |
| 2401 | tatgtttttg cagtcaatgt gaattcttac gaatgtacaa cacaaactgt atgaagccat | |
| 2461 | gaaggaaaca gaggggccaa agggtg | |
| 1 | mvnnysleev theeavailk ntsevvylkv gkpttiymtd pygppdiths ysppmenhll | (SEQ ID NO:263) |
| 61 | sgnngtleyk tslppispgr yspipkhmlv dddytrppep vystvnklcd kpasprhysp | |
| 121 | vecdksflls apyshyhlgl lpdsemtshs qhstatrqps mtlqravsle geprkvvlhk | |
| 181 | gstglgfniv ggedgegifv sfilaggpad lsgelqrgdq ilsvngidlr gasheqaaaa | |
| 241 | lkgagqtvti iaqyqpedya rfeakihdlr eqmmnhsmss gsgslrtnqk rslyvramfd | |
| 301 | ydkskdsglp sqglsfkygd ilhvinasdd ewwqarrvml egdseemgvi pskrrverke | |
| 361 | rarlktvkfn akpgvidskg sfhdkrkksf ifsrkfpfyk nkeqseqets dpergqedli | |
| 421 | lsyepvtrqe inytrpviil gpmkdrindd lisefpdkfg scvphttrpk rdyevdgrdy | |
| 481 | hfvisreqme kdiqehkfie agqyndnlyg tsvqsvrfva ergkhcildv sgnaikrlqv | |
| 541 | aqlypiaifi kprsleplme mnkrlteeqa kktydraikl eqefgeyfta ivqgdtledi | |
| 601 | ynqcklviee qsgpfiwips kekl | |

[0769] DLG2: discs, large homolog 2, chapsyn-110 channel-associated protein of synapses-110′ genbank accession number U32376 (version 2)

| | | | | | | | |
|---|---|---|---|---|---|---|---|
| 1 | aaaagcaact | gaggtcttaa | ctttcagacg | ctgaattctc | atctaattga | aattactggg | (SEQ ID NO:264) |
| 61 | cataatgcta | tatatagcca | atgaagagat | tttgagctct | cactcagtgc | cttcaagaca | |
| 121 | tgtcgttttg | tagtcagaga | aaacagagat | caatgcattt | tcaaactgac | agagggaacg | |
| 181 | gatgctcttt | agtagcacat | gcccaggatc | gtgtgtgtgg | ggcttgcgct | gtgctgagaa | |
| 241 | gctgaatacc | ggtccatatg | ctccttattt | actgcaatgt | tctttgcatg | ttactgtgca | |
| 301 | ctccggacta | acgtgaagaa | gtatcgatat | caagatgagg | acgctccaca | tgatcattcc | |
| 361 | ttacctcgac | taacccacga | agtaagaggc | ccagaactcg | tgcatgtatc | agaaaagaac | |
| 421 | ctctctcaaa | tagaaaatgt | ccatggatat | gtcctgcagt | ctcatatttc | tcctctgaag | |
| 481 | gccagtcctg | ctcctataat | tgtcaacaca | gatactttgg | acacaattcc | ttatgtcaat | |
| 541 | gggacagaaa | ttgaatatga | atttgaagaa | attacactgg | agagggggaa | ttctggcctg | |
| 601 | ggattcagta | ttgctggggg | gacagataat | ccccacattg | gagatgaccc | tggcatattt | |
| 661 | attacgaaga | ttataccagg | aggtgctgca | gcagaggatg | gcagactcag | ggtcaatgat | |
| 721 | tgtatcttgc | gggtgaatga | ggttgatgtg | tcagaggttt | cccacagtaa | agcggtggaa | |
| 781 | gccctgaagg | aagcagggtc | tatcgctcgg | ctgtatgtgc | gtagaagacg | acctattttg | |
| 841 | gagaccgttg | tggaaatcaa | actgttcaaa | ggccctaaag | gtttaggctt | cagtattgca | |
| 901 | ggaggtgtgg | ggaaccaaca | cattcctgga | gacaacagca | tttatgtaac | taaaattata | |
| 961 | gatggaggag | ctgcacaaaa | agatggaagg | ttgcaagtag | gagatagact | actaatggta | |
| 1021 | aacaactaca | gtttagaaga | agtaacacac | gaagaggcag | tagcaatatt | aaagaacaca | |
| 1081 | tcagaggtag | tttatttaaa | agttggcaac | cccactacca | tttatatgac | tgatccttat | |
| 1141 | ggtccacctg | atattactca | ctcttattct | ccaccaatgg | aaaaccatct | actctctggc | |
| 1201 | aacaatggca | ctttagaata | taaaacctcc | ctgccaccca | tctctccagg | gaggtactca | |
| 1261 | ccaattccaa | agcacatgct | tgttgacgac | gactacacca | ggcctccgga | acctgtttac | |
| 1321 | agcactgtga | acaaactatg | tgataagcct | gcttctccca | ggcactattc | ccctgttgag | |
| 1381 | tgtgacaaaa | gcttcctcct | ctcagctccc | tattcccact | accacctagg | cctgctacct | |
| 1441 | gactctgaga | tgaccagtca | ttcccaacat | agcaccgcaa | ctcgtcagcc | ttcaatgact | |
| 1501 | ctccaacggg | ccgtctccct | ggaaggagag | cctcgcaagg | tagtcctgca | caaaggctcc | |
| 1561 | actggcctgg | gcttcaacat | tgtcggtggg | gaagatggag | aaggtatttt | tgtgtccttc | |
| 1621 | attctggctg | gtggaccagc | agacctaagt | ggggagctcc | agagaggaga | ccagatccta | |
| 1681 | tcggtgaatg | gcattgacct | ccgtggtgca | tcccacgagc | aggcagctgc | tgcactaaag | |
| 1741 | ggggctggac | agacagtgac | gattatagca | caatatcaac | ctgaagatta | cgctcgattt | |
| 1801 | gaggccaaaa | tccatgacct | acgagagcag | atgatgaacc | acagcatgag | ctccgggtcc | |
| 1861 | ggatccctgc | gaaccaatca | gaaacgctcc | ctctacgtca | gagccatgtt | cgactacgac | |
| 1921 | aagagcaagg | acagtgggct | gccaagtcaa | ggacttagtt | ttaaatatgg | agatattctc | |
| 1981 | cacgttatca | atgcctctga | tgatgagtgg | tggcaagcca | ggagagtcat | gctggaggga | |
| 2041 | gacagtgagg | agatgggggt | catccccagc | aaaaggaggg | tggaaagaaa | ggaacgtgcc | |
| 2101 | cgattgaaga | cagtgaagtt | taatgccaaa | cctggagtga | ttgattcgaa | agggtcattc | |
| 2161 | aatgacaagc | gtaaaaagag | cttcatcttt | tcacgaaaat | tcccattcta | caagaacaag | |
| 2221 | gagcagagtg | agcaggaaac | cagtgatcct | gaacgtggac | aagaagacct | cattctttcc | |
| 2281 | tatgagcctg | ttacaaggca | ggaaataaac | tacacccggc | cggtgattat | cctggggccc | |
| 2341 | atgaaggatc | ggatcaatga | cgacttgata | tctgaattcc | ctgataaatt | tggctcctgt | |
| 2401 | gtgcctcata | ctacgaggcc | aaagcgagac | tacgaggtgg | atggcagaga | ctatcacttt | |
| 2461 | gtcatttcca | gagaacaaat | ggagaaagat | atccaagagc | acaagtttat | agaagccggc | |
| 2521 | cagtacaatg | acaatttata | tggaaccagt | gtgcagtctg | tgagatttgt | agcagaaaga | |
| 2581 | ggcaaacact | gtatacttga | tgtatcagga | aatgctatca | agcggttaca | agttgcccag | |
| 2641 | ctctatccca | ttgccatctt | cataaaaccc | aggtctctgg | aatctcttat | ggagatgaat | |
| 2701 | aagcgtctaa | cagaggaaca | agccaagaaa | acctatgatc | gagcaattaa | gctagaacaa | |
| 2761 | gaatttggag | aatattttac | agctattgtc | caaggagata | ctttagaaga | tatatataac | |
| 2821 | caatgcaagc | ttgttattga | agagcaatct | gggcctttca | tctggattcc | ctcaaaggaa | |
| 2881 | aagttataaa | ttagctactg | cgcctctgac | aacgacagaa | gagcatttag | aagaacaaaa | |
| 2941 | tatatataac | atactacttg | gaggctttta | tgtttttgtt | gcatttatgt | ttttgcagtc | |
| 3001 | aatgtgaatt | cttacgaatg | tacaacacaa | actgtatgaa | gccatgaagg | aaacagaggg | |
| 3061 | gccaaagggt | g | | | | | |

| | |
|---|---|
| FFACYCALRTNVKKYRYQDEDAPHDHSLPRLTHEVRGPELVHV | (SEQ ID NO:265) |
| EKNLSQIENVHGYVLQSHISPLKASPAPIIVNTDTLDTIPYVNGTEIEYEFEEITLE | |
| GNSGLGFSIAGGTDNPHIGDDPGIFITKIIPGGAAAEDGRLRVNDCILRVNEVDVSE | |
| SHSKAVEALKEAGSIARLYVRRRRPILETVVEIKLFKGPKGLGFSIAGGVGNQHIPG | |
| NSIYVTKIIDGGAAQKDGRLQVGDRLLMVNNYSLEEVTHEEAVAILKNTSEVVYLKV | |
| NPTTIYMTDPYGPPDITHSYSPPMENHLLSGNNGTLEYKTSLPPISPGRYSPIPKHM | |
| VDDDYTRPPEPVYSTVNKLCDKPASPRHYSPVECDKSFLLSAPYSHYHLGLLPDSEM | |
| SHSQHSTATRQPSMTLQRAVSLEGEPRKVVLHKGSTGLGFNIVGGEDGEGIFVSFIL | |
| GGPADLSGELQRGDQILSVNGIDLRGASHEQAAAALKGAGQTVTIIAQYQPEDYARF | |
| AKIHDLREQMMNHSMSSGSGSLRTNQKRSLYVRAMFDYDKSKDSGLPSQGLSFKYGD | |
| LHVINASDDEWWQARRVMLEGDSEEMGVIPSKRRVERKERARLKTVKFNAKPGVIDS | |
| GSFNDKRKKSFIFSRKFPFYKNKEQSEQETSDPERGQEDLILSYEPVTRQEINYTRP | |
| IILGPMKDRINDDLISEFPDKFGSCVPHTTRPKRDYEVDGRDYHFVISREQMEKDIQ | |
| HKFIEAGQYNDNLYGTSVQSVRFVAERGKHCILDVSGNAIKRLQVAQLYPIAIFIKP | |
| SLESLMEMNKRLTEEQAKKTYDRAIKLEQEFGEYFTAIVQGDTLEDIYNQCKLVIEE | |
| SGPFIWIPSKEKL | |

SLESLMEMNKRLREEQAKKTYCRAIKLEQEFGEYETAIVQGDTLEDIYNQCKLVIEE SGPFIWIPSKEKL

[0770] DLG1: discs, large (Drosophila) homolog 1, genbank accession number U13896

| | | | | | | | |
|---|---|---|---|---|---|---|---|
| 1 | gttggaaacg | gcactgctga | gtgaggttga | ggggtgtctc | ggtatgtgcg | ccttggatct | (SEQ ID NO:266) |
| 61 | ggtgtaggcg | aggtcacgcc | tctcttcaga | cagcccgagc | cttcccggcc | tggcgcgttt | |
| 121 | agttcggaac | tgcgggacgc | cggtgggcta | gggcaaggtg | tgtgccctct | tcctgattct | |
| 181 | ggagaaaaat | gccggtccgg | aagcaagata | cccagagagc | attgcacctt | ttggaggaat | |
| 241 | atcgttcaaa | actaagccaa | actgaagaca | gacagctcag | aagttccata | gaacgggtta | |
| 301 | ttaacatatt | tcagagcaac | ctctttcagg | ctttaataga | tattcaagaa | ttttatgaag | |
| 361 | tgaccttact | ggataatcca | aaatgtatag | atcgttcaaa | gccgtctgaa | ccaattcaac | |
| 421 | ctgtgaatac | ttgggagatt | tccagccttc | caagctctac | tgtgacttca | gagacactgc | |
| 481 | caagcagcct | tagccctagt | gtagagaaat | acaggtatca | ggatgaagat | acacctcctc | |
| 541 | aagagcatat | ttccccacaa | atcacaaatg | aagtgatagg | tccagaattg | gttcatgtct | |
| 601 | cagagaagaa | cttatcagag | attgagaatg | tccatggatt | tgtttctcat | tctcatattt | |
| 661 | caccaataaa | gccaacagaa | gctgttcttc | cctctcctcc | cactgtccct | gtgatccctg | |
| 721 | tcctgccagt | ccctgctgag | aatactgtca | tcctacccac | cataccacag | gcaaatcctc | |
| 781 | ccccagtact | ggtcaacaca | gatagcttgg | aaacaccaac | ttacgttaat | ggcacagatg | |
| 841 | cagattatga | atatgaagaa | atcacacttg | aaaggggaaa | ttcagggctt | ggtttcagca | |
| 901 | ttgcaggagg | tacggacaac | ccacacattg | gagatgactc | aagtattttc | attaccaaaa | |
| 961 | ttatcacagg | gggagcagcc | gcccaagatg | gaagattgcg | ggtcaatgac | tgtatattac | |
| 1021 | aagtaaatga | agtagatgtt | cgtgatgtaa | cacatagcaa | agcagttgaa | gcgttgaaag | |
| 1081 | aagcagggtc | tattgtacgc | ttgtatgtaa | aaagaaggaa | accagtgtca | gaaaaaataa | |
| 1141 | tggaaataaa | gctcattaaa | ggtcctaaag | gtcttgggtt | tagcattgct | ggaggtgttg | |
| 1201 | gaaatcagca | tattcctggg | gataatagca | tctatgtaac | caaaataatt | gaaggaggtg | |
| 1261 | cagcacataa | ggatggcaaa | cttcagattg | gagataaact | tttagcagtg | aataacgtat | |
| 1321 | gtttagaaga | agttactcat | gaagaagcag | taactgcctt | aaagaacaca | tctgattttg | |
| 1381 | tttatttgaa | agtggcaaaa | cccacaagta | tgtatatgaa | tgatggctat | gcaccacctg | |
| 1441 | atatcaccaa | ctcttcttct | cagcctgttg | ataaccatgt | tagcccatct | tccttcttgg | |
| 1501 | gccagacacc | agcatctcca | gccagatact | ccccagtttc | taaagcagta | cttggagatg | |
| 1561 | atgaaattac | aagggaacct | agaaaagttg | ttcttcatcg | tggctcaacg | ggccttggtt | |
| 1621 | tcaacattgt | aggaggagaa | gatggagaag | gaatatttat | ttcctttatc | ttagccggag | |
| 1681 | gacctgctga | tctaagtgga | gagctcagaa | aaggagatcg | tattatatcg | gtaaacagtg | |
| 1741 | ttgacctcag | agctgctagt | catgagcagg | cagcagctgc | attgaaaaat | gctggccagg | |
| 1801 | ctgtcacaat | tgttgcacaa | tatcgacctg | aagaatacag | tcgttttgaa | gctaaaatac | |
| 1861 | atgatttacg | ggagcagatg | atgaatagta | gtattagttc | agggtcaggt | tctcttcgaa | |
| 1921 | ctagccagaa | gcgatccctc | tatgtcagag | ccctttttga | ttatgacaag | actaaagaca | |
| 1981 | gtgggcttcc | cagtcaggga | ctgaacttca | aatttggaga | tatcctccat | gttattaatg | |
| 2041 | cttctgatga | tgaatggtgg | caagccaggc | aggttacacc | agatggtgag | agcgatgagg | |
| 2101 | tcggagtgat | tcccagtaaa | cgcagagttg | agaagaaaga | acgagcccga | ttaaaaacag | |
| 2161 | tgaaattcaa | ttctaaaacg | agagataaag | ggcagtcatt | caatgacaag | cgtaaaaaga | |
| 2221 | acctcttttc | ccgaaaattc | cccttctaca | agaacaagga | ccagagtgag | caggaaacaa | |
| 2281 | gtgatgctga | ccagcatgta | acttctaatg | ccagcgatag | tgaaagtagt | taccgtggtc | |
| 2341 | aagaagaata | cgtcttatct | tatgaaccag | tgaatcaaca | agaagttaat | tatactcgac | |
| 2401 | cagtgatcat | attgggacct | atgaaagaca | ggataaatga | tgacttgatc | tcagaatttc | |
| 2461 | ctgacaaatt | tggatcctgt | gttcctcata | caactagacc | aaaacgagat | tatgaggtag | |
| 2521 | atggaagaga | ttatcatttt | gtgacttcaa | gagagcagat | ggaaaaagat | atccaggaac | |
| 2581 | ataaattcat | tgaagctggc | cagtataaca | atcatctata | tggaacaagt | gttcagtctg | |
| 2641 | tacgagaagt | agcaggaaag | ggcaaacact | gtatccttga | tgtgtctgga | aatgccataa | |
| 2701 | agagattaca | gattgcacag | ctttacccta | tctccatttt | tattaaaccc | aaatccatgg | |
| 2761 | aaaatatcat | ggaaatgaat | aagcgtctaa | cagaagaaca | agccagaaaa | acatttgaga | |
| 2821 | gagccatgaa | actggaacag | gagtttactg | aacatttcac | agctattgta | cagggggata | |
| 2881 | cgctggaaga | catttacaac | caagtgaaac | agatcataga | agaacaatct | ggttcttaca | |
| 2941 | tctgggttcc | ggcaaaagaa | aagctatgaa | aactcatgtt | tctctgtttc | tcttttccac | |
| 3001 | aattccattt | tctttggcat | ctctttgccc | tttcctctgg | aaaaaa | | |

| | |
|---|---|
| MPVRKQDTQRALHLLEEYRSKLSQTEDRQLRSSIERVINIFQSN | (SEQ ID NO:267) |
| LFQALIDIQEFYEVTLLDNPKCIDRSKPSEPIQPVNTWEISSLPSSTVTSETLPSSLS | |
| PSVEKYRYQDEDTPPQEHISPQITNEVIGPELVHVSEKNLSEIENVHGFVSHSHISPI | |
| KPTEAVLPSPPTVPVIPVLPVPAENTVILPTIPQANPPPVLVNTDSLETPTYVNGTDA | |
| DYEYEEITLERGNSGLGFSIAGGTDNPHIGDDSSIFITKIITGGAAAQDGRLRVNDCI | |
| LQVNEVDVRDVTHSKAVEALKEAGSIVRLYVKRRKPVSEKIMEIKLIKGPKGLGFSIA | |
| GGVGNQHIPGDNSIYVTKIIEGGAAHKDGKLQIGDKLLAVNNVCLEEVTHEEAVTALK | |
| NTSDFVYLKVAKPTSMYMNDGYAPPDITNSSSQPVDNHVSPSSFLGQTPASPARYSPV | |
| SKAVLGDDEITREPRKVVLHRGSTGLGFNIVGGEDGEGIFISFILAGGPADLSGELRK | |
| GDRIISVNSVDLRAASHEQAAAALKNAGQAVTIVAQYRPEEYSRFEAKIHDLREQMMN | |
| SSISSGSGSLRTSQKRSLYVRALFDYDKTKDSGLPSQGLNFKFGDILHVINASDDEWW | |
| QARQVTPDGESDEVGVIPSKRRVEKKERARLKTVKFNSKTRDKGQSFNDKRKKNLFSR | |
| KFPFYKNKDQSEQETSDADQHVTSNASDSESSYRGQEEYVLSYEPVNQQEVNYTRPVI | |
| ILGPMKDRINDDLISEFPDKFGSCVPHTTRPKRDYEVDGRDYHFVTSREQMEKDIQEH | |
| KFIEAGQYNNHLYGTSVQSVREVAGKGKHCILDVSGNAIKRLQIAQLYPISIFIKPKS | |
| MENIMEMNKRLTEEQARKTFERAMKLEQEFTEHFTAIVQGDTLEDIYNQVKQIIEEQS | |
| GSYIWVPAKEKL | |

[0771] Putative function
[0772] Component of cell junctions, possible role in proliferation

### Example 28B

### Validation of GENE Function by RNA interference (RNAi) Knockdown in Drosophila Cultured Cells

[0773] To confirm the mitotic role of the target protein, knockdown of GENE expression is performed in cultured Drosophila Dme1-2 cells using a double stranded RNA (dsRNA) from within the Dlg1 (CG1725) gene corresponding to the following sequence:

| | |
|---|---|
| GGAGGCCTTTCATCCGGACAACAATTGTCGCAGTCCCAATCGCAGTTGGCCACCAGC | (SEQ ID NO:268) |
| CAGAGCCAAAGTCAGGTGCATCAGCAGCAGCATGCGACGCCGATGGTCAATTCGCA | |
| GTCGACAGGTGCGCTAAATAGTATGGGACAGACGGTTGTCGATTCACCATCAATACC | |
| ACAAGCAGCCGCAGCAGTAGCAGCAGCAGCAAATGCATCTGCATCTGCATCAGTCA | |
| TTGCAAGCAACAACACAATCAGCAACACCACAGTCACCACAGTCACGGCCACGGCC | |
| ACAGCCAGCAACAGTAGCAGCAAGTTGCCGCCGTCGCTTGGCGCTAACAGCAGCAT | |
| TAGCATTAGCCAATAGCAATAGCAATAGCAACAGCAATAATATCAACAACATTAATA | |
| GCATCAACAACAACAACAGTAGCAGCAGCAGCACGACGGCAACTGTTGCAGCAGCA | |
| ACACCAACAGCAGCATCAGCAGCAGCAGCAGCAGCATCATCTCCACCCGCCAACTC | |
| CTTCTATAA | |

[0774] dsRNA is prepared by annealing complimentary RNAs made by in vitro transcription from a PCR fragment created with the following PCR primers:

(SEQ ID NO:269)

TAATACGACTCACTATAGGGAGAGGAGGCCTTTCATCCGGACAACAAT

(SEQ ID NO:270)

TAATACGACTCACTATAGGGAGATTATAGAAGGAGTTGGCGGGTGGAG

[0775] Cells are transfected with double stranded RNA in the presence of ‘Transfast’ transfection reagent. A control transfection of a non-endogenous RNA corresponding to RFP (red fluorescent protein) is carried out in parallel.

[0776] Analysis of Dlg1 Knockdown by RNAi in D-Mel2 Cells by Cellomics Mitotic Index Assay

[0777] For the transfection, 1 μg dsRNA is added to a well of a 96-well Packard viewplate and 35 μl of logarithmically growing DMel-2 cells diluted to 2.3×10⁵ cells/ml in fresh Drosophila-SFM/glutamine/Pen-Strep are added. Cells are incubated with the dsRNA (60 nM) in a humid chamber at 28° C. for 1 hr before addition of 100 μl Drosophila-SFM/glutamine/Pen-Strep. Cells are incubated at 28° C. for 72 hours before analysis. For the assay, cells were fixed and stained using the Cellomics Mitotic Index HitKit following manufacturers instructions. The mitotic index of cells in each well was determined using the ArrayScan HCS System, running the Application protocol Mike_{—}250502_Polgen_MitoticIndex_{—}10×_p2.0 with the 10× objective and the DualBGlp filter set. This automated screening system detects the levels of a specific antigen (phosphorylated histone H3) which is only detectable during mitosis while the chromosomes are condensed.

[0778] Results for Dlg1 (CG1725) are shown in FIG. 5. A reproducible and significant reduction in mitotic index is observed in this assay indicating a reduction in the number of cells entering mitosis after RNAi

[0779] Analysis of Dlg1 Knockdown by RNAi in D-Mel2 cells by Microscopy

[0780] For transfection 9 μl of Transfast reagent (Promega) is added to 3μg gene specific dsRNA in 500 μl Drosophila Schneiders medium (no additives) and incubated at room temperature for 15 min. For control wells an equivalent amount of RFP dsRNA is used. This mix is added to a well of a 6-well tissue culture plate containing a glass coverslip and 500 μl of a Dme1-2 cells at 1×10⁶ cells/ml in shneiders medium. After a 1 hour incubation at 28° C., 2 mls Schneiders medium+10% FCS and pen/strep solution is added and cells are incubated at 28° C. for 48 hours. Cells on the coverslip are fixed in formaldehyde and stained with antibodies which detect α-tubulin and γ-tubulin (centrosomes), and are co-stained with DAPI to detect DNA.

[0781] Although no pronounced increase in the frequency of chromosomal defects (see Table 3 below) was observed upon RNAi, there was a small increase (30% compared to 10% in control cells) of spindle defects, of which the majority (>90%) had multiple centrosomes (more than 2).

TABLE 3
Mitotic defects observed in Dmel-2 cells after siRNA with Dlg1
(CG1725)

| | Number cells with | Number of | % of chromosomal |
|---|---|---|---|
| | chromosomal | cells with | defects (no defects/ |
| dsRNA | defects | normal mitisis | total cells in mitosis) |
| No RNA | 135 | 314 | 39.47 |
| RFP | 137 | 309 | 40.29 |
| CG1725 | 152 | 169 | 47.35 |

### Example 28B

### Human Dlg1 and Dlg2 are Human Homologues of Drosophila Dlg1

[0782] BLASTP with Drosophila Dlg1 reveals 59% (306/517) sequence identity with regions of the human discs, large (Drosophila) homolog 1 (GENBANK ACCESSION U13896), and 60% (318/524) sequence identity with regions of human discs, large (Drosophila) homolog 2 (GENBANK ACCESSION U32376) that human Dlg1 and Dlg2 are is a homologues of Drosophila Dlg1. The BLASTP results are shown in FIG. 6. FIG. 7 shows a Clustal W alignment of Drosophila Dlg1 and the five human Dlg homologues that are currently detailed in the NCBI database. Considering the homology between the human Dlg proteins, it is probable that some or all of them are functionally similar to Drosophila Dlg1.

[0783] The nucleotide sequence of the human Dlg1 and human Dlg2 genes and their deduced amino acid sequences are shown in example 28 above.

### Example 28C

### Validation of the Mitotic Role of the Human Homologue by siRNA Knockdown of GENE Expression in Human Cultured Cells

[0784] Generation of siRNA Human Dlg1 and Dlg2 Knockdowns

[0785] Knockdown of human Dlg1 and Dlg2 gene expression is achieved by siRNA (short interfering RNA, Elbashir et al, Nature May 24, 2001;411(6836):494-8). We used synthetic double stranded RNAs corresponding to two different regions of each of the human Dlg1 and Dlg2 mRNAs. Synthetic siRNAs are obtained from Dharmacon Inc (our supplier). The siRNA sequences are:

| | | | |
|---|---|---|---|
| COD1652 | dlg2-1 | AACAUUGUCGGUGGG | Corresponds to nucleotides |
| | | GAAGAU | 1576-1596 human Dlg-2 |
| | | (SEQ ID NO:271) | (see example 28 above) |
| COD1653 | dlg2-2 | AAAACCCAGGUCUCU | Corresponds to nucleotides |
| | | GGAACC | 2664-2684 in human Dlg-2 |
| | | (SEQ ID NO:272) | (see example 28 above) |
| COD1654 | dlg1-1 | AAAGGGGAAAUUCAG | Corresponds to nucleotides |
| | | GGCUUG | 871-891 in human Dlg-1 |
| | | (SEQ ID NO:273) | (see example 28 above) |
| COD1655 | dlg1-2 | AAGUAGCAGGAAAGG | Corresponds to nucleotides |
| | | GCAAAC | 2647-2667 in human Dlg-1 |
| | | (SEQ ID NO:274) | (see example 28 above) |

[0786] Analysis of siRNA Hu Dlg1 and Dlg2 Knockdowns in U2OS Cells by Flow Cytometry Analysis

[0787] Cells are seeded in 6-well tissue culture dishes at 1×10⁵ cells/well in 2 ml Dulbecco's Modified Eagle's Medium (DMEM) (Sigma)+10% Foetal Bovine Serum (FBS) (Perbio), and incubated overnight (37° C./5% CO₂).

[0788] For each well, 12 μl of 20 μM siRNA duplex (Dharmacon, Inc) (in RNAse-free H₂O) is mixed with 200 μl of Optimem (Invitrogen). In a separate tube 8 μl of oligofectamine reagent (Invitrogen) was mixed with 52 μl of Optimem, and incubated at room temperature for 7-10 mins. The oligofectamine/Optimem mix is then added dropwise to the siRNA/Optimem mix, and this is then mixed gently, before being incubated for 15-20 mins at room temperature. During this incubation the cells are washed once with DMEM (with no FBS or antibiotics added). 600 μl of DMEM (no FBS or antibiotics) is then added to each well.

[0789] Following the 15-20 min incubation, 128 μl of Optimem is added to the siRNA/oligofectamine/optimem mix, and this was added to the cells (in 600 μl DMEM). The transfection mix is added at the edge of each well to assist dilution before contact is made with the cells. Cells are then incubated with the transfection mix for 4 h (37° C./5% CO₂). Subsequently 1 ml DMEM+20% FBS is added to each well. Cells are then incubated at 37° C./5% CO₂ for 72 h. Cells are harvested by trypsinisation, washed in PBS, fixed in ice-cold 70% EtOH and stained with propidium iodide before Facs analysis.

[0790] siRNA Hu Dlg1 and Dlg2 knockdowns are conducted in U2OS. As shown in FIG. 8 major changes in the distribution of cells between cell cycle compartments (G1, S, G2/M) are seen with Dlg1 siRNA COD1564 and Dlg2 siRNA COD1562. In both cases an accumulation of cells with a 2N DNA content, indicated as the G2/M compartment of the cell cycle, is observed with a concomitant reduction in the 1N DNA content G1 compartment population. This indicates that a proportion of cells may unable to exit mitosis and renter G1 and so may be unable to complete cytokinesis, or have entered the next cycle as polyploid cells.

[0791] Subsequent microscopic analysis is performed in order to phenotype the Hu Dlg1 and Dlg2 siRNA induced defect and check for the presence of large multinucleate cells which may, due to their size and ploidy, be excluded from the FACS analysis.

[0792] Analysis of Hu Dlg1 and Dlg2 siRNA Knockdowns in U2OS Cells by Microscopy

[0793] The transfection method for samples for microscopy is identical to that for Facs except that cells are plated in wells containinmg a sterile glass coverslip. Cells are incubated with siRNA for 48 hours before formaldehyde fixation and co-staining with Dapi to reveal DNA (blue) and antibodies to reveal microtubules (red) and centrosomes (green). Antibodies used are: rat anti-alpha tubulin (YL12) (supplier Serotec) with secondary antibody goat anti-rat IgG-TRITC (supplier Jackson Immunoresearch) and mouse anti-gamma-tubulin (GTU88) with secondary antibody Alexagreen488-goat anti-mouseIgG (supplier Sigma).

[0794] Phenotype analysis by microscopy is conducted on U2OS cells. Results from duplicate experiments in U2OS cells are shown in FIGS. 9 and 10, and Table 4 below. Generally after siRNA more of the cells in mitosis seem to be in the early stages, prometaphase rather than the later stages (metaphase, anaphase telophase) a high frequency of cells have multiple centrosomes as is also observed in RNAi with Dme1-2 cell siRNA (see above). In addition transfected cells appear to be unable to successfully carry out cytokinesis which may account for the increase in polyploid cells.

TABLE 4
Brief description of significant cell division defects after
Dlg1 and 2 siRNA in U2OS cells.

| Gene/siRNA | Dlg1/COD1564 | Dlg2/COD1562 |
|---|---|---|
| Cell Type | U2OS | U2OS |
| Polyploidy | Increased (4.8/field | Increased (4.8/field |
| | compared to 1.6/field in | compared to 1.6/field in |
| | nuntreated) | nuntreated) |
| Mitotic Defects | Increased (23% | Increased (36% compared |
| | compared to 13% in | to 13% in untreated) |
| | untreated) | |
| Main knockout | Increased number of | Increased number of |
| phenotype | multi - centrosomal cells | multi - centrosomal cells |
| | (7.3% compared to 2.6% | (6.6% compared to 2.6%) |
| | in untreated) | in untreated) |
| | Cytokinesis defects (10% | Cytokinesis defects (23% |
| | compared to 0% in | compared to 0% in |
| | untreated) | untreated) |
| | Large increase in | Large increase in |
| | apoptotic cells | apoptotic cells |
| Additional | Increase in ratio of | Increase in ratio of |
| observations | prophase to | prophase to prometaphase |
| | prometaphase (61% | (72% compared to 43% |
| | compared to 43% in | in untreated cells) |
| | untreated cells) | Decrease in ratio of |
| | Decrease in ratio of | metaphase (6% compared |
| | metaphase (5% compared | to 22% in untreated cells) |
| | to 22% in untreated cells) | Decrease in ratio of |
| | | anaphase and telophase |
| | | (19% compared to 27% |
| | | in untreated cells) |

[0795] The above results confirm that Dlg1 and Dlg2 are involved in cell cycle progression, in particular, in achieving successful cell separation during cytokinesis. The mutiplication of entrosomes in many cells after Dlg 1 or 2 RNAi may reflect failure to undergo cytokinesis so that cells prematurely enter the next cycle, or may indicate that the centrosome duplication cycle is overriding normal cell cycle checkpoints. Accordingly, modulators of Dlg1 and Dlg2 activity (as identified by the assays described above) may be used to treat any proliferative disease.

### Example 28D

### Expression of Recombinant Hu Dlg Protein in Insect Cells

[0796] A cDNA encoding the Human Dlg1 or Dlg2 coding region derived by RT-PCR is inserted into the baculovirus expression vector pFastbacHTc (Life Technologies). A baculovirus stock is generated and western blot of subsequent infections of Sf9 insect cells demonstrates expression of N-terminal 6-His tagged proteins of approximately 100 kD (Dlg1) and 97kD (Dlg2). The recombinant protein is purified by Ni—NTA resin affinity chromatography.

[0797] Similarly 6-His tagged Dlg proteins are expressed in bacteria by inserting cDNAs into bacterial expression plamids pDest17 or pET series. Protein expression in cultures of host E.coli cells transformed with recombinant plasmid is induced by addition of inducer chemical IPTG. The recombinant protein is purified by Ni—NTA resin affinity chromatography

### Example 28E

### Assay for Modulators of Dlg Activity

[0798] Digs are Membrane-associated guanylate kinase (MAGUK) homologues and contain several protein—protein interaction domains including PDZ domains, SH3 domains and a C-terminal guanylate kinase homology region that does not possess guanylate kinase activities but may act as a protein—protein interaction domain. Several proteins are known to bind huDIg1 including the adenomatous polposis coli (APC) tumor suppressor protein, the human papillomavirus E6 transforming protein, transforming adenovirus E4 protein, and the PDZ-binding kinase PBK (Gaudet et al 2000). An assay for modulators of Dlg activity would consist of an ELISA type assay where full length Dlg protein, or individual PDZ domains of Dlg protein expressed in bacteria or insect cells (as described above) are bound to a solid support, and interaction with the PDZ binding proteins described above could be measured by antibody detection of, or radioactive labelling of the PDZ binding proteins.

### Example 29

### Category 3

[0799] Line ID—419

[0800] Phenotype—Lethal phase, prepupal—pupal. High mitotic index, colchicines-like chromosome condensation, metaphase arrest

[0801] Annotated Drosophila genome genomic segment containing P element insertion site (and map position)—AE003450 (9C)

[0802] P element insertion site—292,726

[0803] Annotated Drosophila genome Complete Genome candidate

[0804] CG12638—sprint, ras associated protein

(SEQ ID NO:275)

ATGTTTGCCATATCATTGCAGCTGCTCAGCTCGCTGGCCAGCGATTTGGA
CATAATGCTAAACGATCTTCGATCGGCGCCGAGTCATGCTGCAACAGCAA
CAGCAACAGCAACAACAACGGCAACAGTTGCAACTGCAACCGCAACAACA
ACGGCCAACCGGCAGCAGCAACATCATAATCACCATAATCAGCAGCAAAT
GCAATCAAGGCAATTGCATGCACATCATTGGCAGAGCATTAACAACAATA
AGAATAACAACATTAGTAACAAAAACAACAACAACAACAACAATAATAAC
AATAACATTAATAACAATAATAATAATAATAATCATTCGGCACACCCACC
TTGCCTGATCGATATTAAGCTGAAGTCAAGCCGATCGGCAGCAACAAAAA
TAACCCATACAACAACCGCCAATCAGCTGCAGCAACAACAACGCCGCCGT
GTGGCACCCAAGCCACTGCCACGCCCACCGCGACGTACCCGCCCAACGGG
ACAAAAGGAGGTGGGGCCGTCTGAAGAGGATGGGGACACGGATGCCAGTG
ACCTGGCCAATATGACATCACCGCTGAGCGCCAGTGCAGCGGCCACTCGA
ATCAACGGCCTCTCGCCGGAAGTGAAGAAAGTCCAGCGGTTGCCACTGTG
GAATGCGCGAAACGGAAACGGAAGTACCACCACCCACTGTCACCCAACCG
GCGTCTCTGTGCAACGCCGTCTGCCCATCCAAAGTCATCAGCAGCGAATT
CTAAACCAACGATTTCATCACCAGCGAATGCATCATGGGTAA

(SEQ ID NO:276)

MFAISLQLLSSLASDLDIMLNDLRSAPSHAATATATATTTATVATATATT
TANRQQQHHNHHNQQQMQSRQLHAHHWQSI NNKNNNISNKNNNNNNNNN
NNINNNNNNNNHSAHPPCLIDIKLKSSRSAATKTHTTTANQLQQQQRRR
VAPKPLPRPPRRTRPTGQKEVGPSEEDGDTDASDLANMTSPLSASAAATR
INGLSPEVKKVQRLPLWNARNGNGSTTTHC HPTGVSVQRRLPIQSHQQRI
LNQRFHHQRM HHG

[0805] Human homologue of Complete Genome candidate

[0806] B38637—Ras inhibitor (clone JC265)—human (fragment)

```
(SEQ ID NO:277)
      1 ggccggcagc ggctgagcga catgagcatt tctacttcct cctccgactc gctggagttc
    61 gaccggagca tgcctctgtt tggctacgag gcggacacca acagcagcct ggaggactac
  121 gagggggaaa gtgaccaaga gaccatggcg ccccccatca agtccaaaaa gaaaaggagc
  181 agctccttcg tgctgcccaa gctcgtcaag tcccagctgc agaaggtgag cggggtgttc
  241 agctccttca tgaccccgga gaagcggatg gtccgcagga tcgccgagct ttcccgggac
  301 aaatgcacct acttcgggtg cttagtgcag gactacgtga gcttcctgca ggagaacaag
  361 gagtgccacg tgtccagcac cgacatgctg cagaccatcc ggcagttcat gacccaggtc
  421 aagaactatt tgtctcagag ctcggagctg gaccccccca tcgagtcgct gatccctgaa
  481 gaccaaatag atgtggtgct ggaaaaagcc atgcacaagt gcatcttgaa gcccctcaag
  541 gggcacgtgg aggccatgct gaaggacttt cacatggccg atggctcatg gaagcaactc
  601 aaggagaacc tgcagcttgt gcggcagagg aatccgcagg agctgggggt cttcgccccg
  661 acccctgatt ttgtggatgt ggagaaaatc aaagtcaagt tcatgaccat gcagaagatg
  721 tattcgccgg aaaagaaggt catgctgctg ctgcgggtct gcaagctcat ttacacggtc
  781 atggagaaca actcagggag gatgtatggc gctgatgact tcttgccagt cctgacctat
  841 gtcatagccc agtgtgacat gcttgaattg gacactgaaa tcgagtacat gatggagctc
  901 ctagacccat cgctgttaca tggagaagga ggctattact tgacaagcgc atatggagca
  961 ctttctctga taaagaattt ccaagaagaa caagcagcgc gactgctcag ctcagaaacc
1021 agagacaccc tgaggcagtg gcacaaacgg agaaccacca accggaccat cccctctgtg
1081 gacgacttcc agaattacct ccgagttgca tttcaggagg tcaacagtgg ttgcacagga
1141 aagaccctcc ttgtgagacc ttacatcacc actgaggatg tgtgtcagat ctgcgctgag
1201 aagttcaagg tgggggaccc tgaggagtac agcctctttc tcttcgttga cgagacatgg
1261 cagcagctgg cagaggacac ttaccctcaa aaaatcaagg cggagctgca cagccgacca
1321 cagccccaca tcttccactt tgtctacaaa cgcatcaaga acgatcctta tggcatcatt
1381 ttccagaacg gggaagaaga cctcaccacc tcctagaaga caggcgggac ttcccagtgg
1441 tgcatccaaa ggggagctgg aagccttgcc ttcccgcttc tacatgcttg agcttgaaaa
1501 gcagtcacct cctcggggac ccctcagtgt agtgactaag ceatecacag gccaactcgg
1561 ccaagggcaa ctttagccac gcaaggtagc tgaggtttgt gaaacagtag gattctcttt
1621 tggcaatgga gaattgcatc tgatggttca agtgtcctga gattgtttgc tacctacccc
1681 cagtcaggtt ctaggttggc ttacaggtat gtatatgtgc agaagaaaca cttaagatac
1741 aagttctttt gaattcaaca gcagatgctt gcgatgcagt gcgtcaggtg attctcactc
1801 ctgtggatgg cttcatccct g
(SEQ ID NO:278)
      1 grqrlsdmsi stsssdslef drsmplfgye adtnssledy egesdqetma ppikskkkrs
    61 ssfvlpklvk sqlqkvsgvf ssfmtpekrm vrriaelsrd kctyfgclvq dyvsflqenk
  121 echvsstdml qtirqfmtqv knylsqssel dppieslipe dqidvvleka mhkcilkplk
  181 ghveamlkdf hmadgswkql kenlqlvrqr npqelgvfap tpdfvdveki kvkfmtmqkm
  241 yspekkvmll lrvckliytv mennsgrmyg addflpvlty viaqcdmlel dteieymmel
  301 ldpsllhgeg gyyltsayga lsliknfqee qaarllsset rdtlrqwhkr rttnrtipsv
  361 ddfqnylrva fqevnsgctg ktllvrpyit tedvcqicae kfkvgdpeey slflfvdetw
  421 qqlaedtypq kikaelhsrp qphifhfvyk rikndpygii fqngeedltt s
```

[0807] Putative function
[0808] Ras associated effector protein

### REFERENCES

[0809] Altschul, S. F. and Lipman, D. J. (1990) Protein database searches for multiple alignments. Proc. Natl. Acad. Sci. USA 87: 5509-5513

[0810] Burge, C. and Karlin, S. (1997) Prediction of complete gene structures in human genomic DNA. J. Mol. Biol. 268, 78-94.

[0811] Deak, P., Omar, M. M., Saunders, R. D. C., Pal, M., Komonyi, O., Szidonya, J., Maroy, P., Zhang, Y., Ashbumer, M., Benos, P., Savakis, C., Siden-Kiamos, I., Louis, C., Bolshakov, V. N., Kafatos, F. C., Madueno, E., Modolell, J., Glover, D. M. (1997) Correlating physical and cytogenetic maps in chromosomal region 86E-87F of Drosophila melanogaster. Genetics 147:1697-1722.

[0812] Gaudet S, Branton D and Lue R A (2000) Characterisation of PDZ-binding kinase, a mitotic kinase PNAS 97, 5167-5172

[0813] Jowett, T. (1986) Preparation of nucleic acids. In “Drosophila: A Practical Approach.” Ed Roberts, D. B. IRL Press Oxford.

[0814] Lefevre, G. (1976) A photographic representation and interpretation of the polytene chromosomes of Drosophila melanogaster salivary glands. In: The Genetics and Biology of Drosophila, Eds Ashbumer, M. and Novitski, E. Academic Press.

[0815] Pirrotta, V. (1986) Cloning Drosophila genes. In: In “Drosophila: A Practical Approach.” Ed Roberts, D. B. IRL Press Oxford.

[0816] Saunders, R. D. C., Glover, D. M., Ashbumer, M., Siden-Kiamos, I., Louis, C., Monastirioti, M., Savakis, C., Kafatos, F. C.(1989) PCR amplification of DNA microdissected from a single polytene chromosome band: a comparison with conventional microcloning. Nucleic Acids Res. 17:9027-9037

[0817] Takada T, Matozaki T, Takeda H, Fukunaga K, Noguchi T, Fujioka Y, Okazaki I, Tsuda M, Yamao T, Ochi F, Kasuga M. (1998) Roles of the complex formation of SHPS-1 with SHP-2 in insulin-stimulated mitogen-activated protein kinase activation. J Biol Chem Apr. 10, 1998;273(15):9234-42

[0818] Torok, T., Tick, G., Alvarado, M., Kiss, I. (1993) P-lacW insertional mutagenesis on the second chromosome of Drosophila melanogaster: isolation of lethals with different overgrowth phenotypes. Genetics 135(1):71-80

[0819] Each of the applications and patents mentioned in this document, and each document cited or referenced in each of the above applications and patents, including during the prosecution of each of the applications and patents (“application cited documents”) and any manufacturer's instructions or catalogues for any products cited or mentioned in each of the applications and patents and in any of the application cited documents, are hereby incorporated herein by reference. Furthermore, all documents cited in this text, and all documents cited or referenced in documents cited in this text, and any manufacturer's instructions or catalogues for any products cited or mentioned in this text, are hereby incorporated herein by reference.

[0820] Various modifications and variations of the described methods and system of the invention will be apparent to those skilled in the art without departing from the scope and spirit of the invention. Although the invention has been described in connection with specific preferred embodiments, it should be understood that the invention as claimed should not be unduly limited to such specific embodiments. Indeed, various modifications of the described modes for carrying out the invention which are obvious to those skilled in molecular biology or related fields are intended to be within the scope of the claims.

1. A method of treating cancer in an individual, comprising administering to said individual a composition comprising a polynucleotide selected from the group consisting of the nucleotide sequences in Table 5, or a polypeptide encoded by the polynucleotide.

2. The method of claim 1, wherein said polypeptide is a human polypeptide selected from the group consisting of the polypeptides in column 3 of Table 5.

3. A method of identifying a substance which binds to a polypeptide selected from the group consisting of the polypeptides in column 3 of Table 5, said method comprising contacting said polypeptide with a candidate substance and detecting the binding of said substance to said polypeptide.

4. A method of identifying a substance which modulates the function of a polypeptide selected from the group consisting of the polypeptides in column 3 of Table 5, said method comprising the steps of: contacting said polypeptide with a candidate substance and determining the activity of said polypeptide, wherein a change in said activity in the presence of said candidate substance is indicative of said substance modulating the function of said polypeptide.

5. A method of diagnosing a cancer in an individual, said method comprising: (a) providing a biological sample of said individual; (b) contacting said biological sample with a probe comprising a fragment of at least 15 nucleotides of a polynucleotide selected from the group consisting of the polynucleotides in Table 5; and (c) detecting the hybridisation between said probe and said biological sample, wherein the presence of hybridisation is indicative of said cancer in said individual.

6. A method of diagnosing a cancer in an individual, said method comprising: (a) providing a biological sample of said individual; (b) contacting said biological sample with an antibody which binds to a polypeptide selected from the group consisting of the polypeptides in column 3 of Table 5; and (c) detecting the binding of said antibody to said sample, wherein the presence of binding is indicative of said cancer in said individual.

7. A method of modulating the expression of a polynucleotide selected from the group consisting of the polynucleotides in Table 5 in a cell, said method comprising introducing a double stranded RNA (dsRNA) which hybridises to said polynucleotide, or an antisense RNA which hybridises to said polynucleotide, or a fragment thereof, into the cell.

8. The method of claim 7, wherein said modulating is down-regulating.

9. A polynucleotide comprising a sequence selected from the group consisting of:
(a) any one of the nucleotide sequences in Example 19 or the complement thereof;
(b) a nucleotide sequence which hybridises to a sequence of (a) or a fragment thereof; and
(c) a polynucleotide sequence which is degenerate as a result of the genetic code to said sequence(s) in (a) or (b).

10. The polynucleotide of claim 9, wherein said sequence in Example 19 is Shp2 polynucleotide sequence or its complement thereof.

11. A polynucleotide comprising a sequence selected from the group consisting of:
(a) any one of the nucleotide sequences in Example 28 or the complement thereof;
(b) a nucleotide sequence which hybridises to a sequence of (a) or a fragment thereof; and
(c) a polynucleotide sequence which is degenerate as a result of the genetic code to said sequence(s) in (a) or (b).

12. The method of claim 11, wherein said sequence in Example 28 is Dlg1 or Dlg2.

13. A polynucleotide comprising a sequence selected from the group consisting of:
(a) any one of the nucleotide sequences in Table 5 or the complement thereof;
(b) a nucleotide sequence which hybridises to a sequence of (a) or a fragment thereof; and
(c) a polynucleotide sequence which is degenerate as a result of the genetic code to said sequence(s) in (a) or (b).

14. A polynucleotide comprising a sequence selected from the group consisting of:
(a) any one of the nucleotide sequences in Examples 1 to 18, 20 to 27 and 29 or the complement thereof;
(b) a nucleotide sequence which hybridises to a sequence of (a) or a fragment thereof; and
(c) a polynucleotide sequence which is degenerate as a result of the genetic code to said sequence(s) in (a) or (b).

15. A polynucleotide comprising a sequence selected from the group consisting of:
(a) any one of the nucleotide sequences in Examples 1, 2, 2A, 2B and 2C or the complement thereof;
(b) a nucleotide sequence which hybridises to a sequence of (a) or a fragment thereof; and
(c) a polynucleotide sequence which is degenerate as a result of the genetic code to said sequence(s) in (a) or (b).

16. A polynucleotide comprising a sequence selected from the group consisting of:
(a) any one of the nucleotide sequences in Examples 3 to 9 and 9A or the complement thereof;
(b) a nucleotide sequence which hybridises to a sequence of (a) or a fragment thereof; and
(c) a polynucleotide sequence which is degenerate as a result of the genetic code to said sequence(s) in (a) or (b).

17. A polynucleotide comprising a sequence selected from the group consisting of:
(a) any one of the nucleotide sequences in Examples 10 to 29 or the complement thereof;
(b) a nucleotide sequence which hybridises to a sequence of (a) or a fragment thereof; and
(c) a polynucleotide sequence which is degenerate as a result of the genetic code to said sequence(s) in (a) or (b).

18. A polynucleotide probe comprising a fragment of at least 15 consecutive nucleotides of a polynucleotide of claim 9.

19. A polypeptide comprising an amino acid sequence selected from the group consisting of the sequences in:
(a) Example 19;
(b) Example 28;
(c) Table 5;
(d) Examples 1 to 18, 20 to 27 and 29;
(e) Examples 1 to 2, 2A, 2B and 2C;
(f) Examples 3 to 9 and 9A;
(g) Examples 10 to 29; and
(h) a homologue, variant, derivative or fragment thereof.

20. The polypeptide of claim 19, wherein said sequence in Example 19 is Shp2 polypeptide.

21. The polypeptide of claim 19, wherein said sequence in Example 28 is Dlg1 or Dlg2 polypeptide.

22. A vector comprising a polynucleotide according to claim 9.

23. An expression vector comprising a polynucleotide according to claim 9, which is operably linked to a regulatory sequence which directs the expression of said polynucleotide in a host cell.

24. An antibody which binds to a polypeptide of claim 19.

25. A method for detecting the presence or absence of a polynucleotide of claim 9 in a biological sample, said method comprising:
(a) contacting the biological sample under hybridising conditions with a probe comprising a fragment of at least 15 consecutive nucleotides of a polynucleotide having a sequence set forth in Example 19 or a complement thereof; and
(b) detecting hybridisation between said probe and said sample.

26. A method for detecting a polypeptide of claim 19 present in a biological sample which comprises:
(a) providing an antibody that binds to said polypeptide;
(b) contacting said biological sample with said antibody; and
(c) determining binding of said antibody to said biological sample.

27. A method of treating cancer in an individual comprising administering a polynucleotide of claim 9.

28. A method of treating cancer in an individual comprising administering a polypeptide of claim 19.

29. A method of treating cancer in an individual comprising administering an antibody of claim 22.

30. A method for identifying a substance which binds to a polypeptide of claim 19, said method comprising contacting said polypeptide with a candidate substance and detecting the binding of said substance to said polypeptide.

31. A method for identifying a substance which modulates the function of a polypeptide of claim 19, said method comprising the steps of: contacting the polypeptide with a candidate substance and determining the activity of said polypeptide, wherein a change in activity in the presence of said candidate substance is indicative of said substance modulating the function of said polypeptide.

32. A method of identifying a human nucleic acid sequence, by: (a) selecting a Drosophila polypeptide identified in any of Examples 11 to 39, (b) identifying a corresponding human polypeptide; and (c) identifying a nucleic acid encoding the human polypeptide of (b).

33. A method according to claim 32, in which a human homologue of the Drosophila sequence, or a human sequence similar to the Drosophila sequence, is identified in step (b).

34. A method according to claim 32, in which the human polypeptide has at least one of the biological activities, preferably substantially all the biological activities of the Drosophila polypeptide.

The application's sequence listing, which the Patent Office published only in electronic form, follows.

SEQUENCE LISTING (306 sequences)

SEQ ID NO: 1 - protein, 16 aa, Artificial sequence
  Penetratin
RQIKIWFQNRRMKWKK

SEQ ID NO: 2 - DNA, 23 bp, Artificial sequence
  T7 polymerase binding site
taatacgactcactatagggaca

SEQ ID NO: 3 - DNA, 48 bp, Artificial sequence
  Primer
taatacgactcactatagggagaacggcacttctttttcttgtcacct

SEQ ID NO: 4 - DNA, 48 bp, Artificial sequence
  Primer
taatacgactcactatagggagaatgatgagcagctccagcagtctct

SEQ ID NO: 5 - DNA, 48 bp, Artificial sequence
  Primer
taatacgactcactatagggagagaagcggatcgtttggcgacattta

SEQ ID NO: 6 - DNA, 48 bp, Artificial sequence
  Primer
taatacgactcactatagggagaagatgggcattgatcgaggcatagc

SEQ ID NO: 7 - DNA, 48 bp, Artificial sequence
  Primer
taatacgactcactatagggagatggcaacgagtacatcgaccgcata

SEQ ID NO: 8 - DNA, 48 bp, Artificial sequence
  Primer
taatacgactcactatagggagataccttgtctccattggccttggtg

SEQ ID NO: 9 - DNA, 48 bp, Artificial sequence
  Primer
taatacgactcactatagggagaccccaaggcgatagataccacgata

SEQ ID NO: 10 - DNA, 48 bp, Artificial sequence
  Primer
taatacgactcactatagggagaatctctggtatggccatcaggcact

SEQ ID NO: 11 - DNA, 48 bp, Artificial sequence
  Primer
taatacgactcactatagggagaggtgaagacgtttcaggcctatcta

SEQ ID NO: 12 - DNA, 48 bp, Artificial sequence
  Primer
taatacgactcactatagggagatcccagccgttctccttgatcatgt

SEQ ID NO: 13 - DNA, 48 bp, Artificial sequence
  Primer
taatacgactcactatagggagatatgtgcatccattcgaaagacttt

SEQ ID NO: 14 - DNA, 48 bp, Artificial sequence
  Primer
taatacgactcactatagggagaataggggaggttgttcttagattga

SEQ ID NO: 15 - DNA, 48 bp, Artificial sequence
  Primer
taatacgactcactatagggagatgaaaccatccgagaagaaggccaa

SEQ ID NO: 16 - DNA, 48 bp, Artificial sequence
  Primer
taatacgactcactatagggagacagataatcatcaaatgcaggaatc

SEQ ID NO: 17 - DNA, 53 bp, Artificial sequence
  Primer
taatacgactcactatagggagaacggaatgaactattttccgaactattact

SEQ ID NO: 18 - DNA, 48 bp, Artificial sequence
  Primer
taatacgactcactatagggagagatgtactgactgttggtgcgcact

SEQ ID NO: 19 - DNA, 48 bp, Artificial sequence
  Primer
taatacgactcactatagggagaatctgtagacagacggcagaattgc

SEQ ID NO: 20 - DNA, 48 bp, Artificial sequence
  Primer
taatacgactcactatagggagacgcaatagcagtacttccatcttgt

SEQ ID NO: 21 - DNA, 48 bp, Artificial sequence
  Primer
taatacgactcactatagggagaattggattgcgaatcgctcaggatc

SEQ ID NO: 22 - DNA, 48 bp, Artificial sequence
  Primer
taatacgactcactatagggagattttcgcgaaggacatcaatatcag

SEQ ID NO: 23 - DNA, 48 bp, Artificial sequence
  Primer
taatacgactcactatagggagaggcctacatcaagaaggagttcgac

SEQ ID NO: 24 - DNA, 48 bp, Artificial sequence
  Primer
taatacgactcactatagggagatggttagttgtatttgcgaatcttc

SEQ ID NO: 25 - DNA, 48 bp, Artificial sequence
  Primer
taatacgactcactatagggagagttgctgatcgacaaacaaacccag

SEQ ID NO: 26 - DNA, 48 bp, Artificial sequence
  Primer
taatacgactcactatagggagactttccagatactgccatctacaga

SEQ ID NO: 27 - DNA, 48 bp, Artificial sequence
  Primer
taatacgactcactatagggagagagtgtcgcgtgtagaggcattctt

SEQ ID NO: 28 - DNA, 48 bp, Artificial sequence
  Primer
taatacgactcactatagggagaaagtacacatggacggagcggatag

SEQ ID NO: 29 - DNA, 50 bp, Artificial sequence
  Primer
taatacgactcactatagggagaggctgccgtttttcctttttgttatcc

SEQ ID NO: 30 - DNA, 51 bp, Artificial sequence
  Primer
taatacgactcactatagggagatgatccttcctctttgactccacctgtt

SEQ ID NO: 31 - DNA, 53 bp, Artificial sequence
  Primer
taatacgactcactatagggagacgctaaaaactagtagttttgtgtgccagg

SEQ ID NO: 32 - DNA, 48 bp, Artificial sequence
  Primer
taatacgactcactatagggagaaccaccattgctggagcacatgttg

SEQ ID NO: 33 - DNA, 48 bp, Artificial sequence
  Primer
taatacgactcactatagggagaggattagcaccgtcgaccacgaaaa

SEQ ID NO: 34 - DNA, 53 bp, Artificial sequence
  Primer
taatacgactcactatagggagaaatttcctgtgtggataacgtgaggagtcc

SEQ ID NO: 35 - DNA, 48 bp, Artificial sequence
  Primer
taatacgactcactatagggagacgttcctgctgtttggcattcttct

SEQ ID NO: 36 - DNA, 48 bp, Artificial sequence
  Primer
taatacgactcactatagggagaaccacaataagaccacccacacagc

SEQ ID NO: 37 - DNA, 48 bp, Artificial sequence
  Primer
taatacgactcactatagggagacaccttctgccgccatgagtacaat

SEQ ID NO: 38 - DNA, 48 bp, Artificial sequence
  Primer
taatacgactcactatagggagattccgcctccagagccttgttgaaa

SEQ ID NO: 39 - DNA, 50 bp, Artificial sequence
  Primer
taatacgactcactatagggagatcaaggcgtccatgatcacctcgaaat

SEQ ID NO: 40 - DNA, 48 bp, Artificial sequence
  Primer
taatacgactcactatagggagaacctgtccagctgcaacttggtcaa

SEQ ID NO: 41 - DNA, 48 bp, Artificial sequence
  Primer
taatacgactcactatagggagaggagatggaaaaggagctcggaaaa

SEQ ID NO: 42 - DNA, 48 bp, Artificial sequence
  Primer
taatacgactcactatagggagatctcaatccgtatgccaaggagcac

SEQ ID NO: 43 - DNA, 48 bp, Artificial sequence
  Primer
taatacgactcactatagggagaagttgacctccaagctccacgaact

SEQ ID NO: 44 - DNA, 48 bp, Artificial sequence
  Primer
taatacgactcactatagggagactggtgcttgatgtgtgtcctaatg

SEQ ID NO: 45 - DNA, 48 bp, Artificial sequence
  Primer
taatacgactcactatagggagacacttggcgattgaacatgaaacaa

SEQ ID NO: 46 - DNA, 48 bp, Artificial sequence
  Primer
taatacgactcactatagggagaatataaaaagcccccaaaagaattg

SEQ ID NO: 47 - DNA, 50 bp, Artificial sequence
  Primer
taatacgactcactatagggagaattgcactttgattgcagtcgattgcg

SEQ ID NO: 48 - DNA, 48 bp, Artificial sequence
  Primer
taatacgactcactatagggagagatgtggaatggtgtgaccgtagtg

SEQ ID NO: 49 - DNA, 48 bp, Artificial sequence
  Primer
taatacgactcactatagggagagacaggcatataactcaggaactta

SEQ ID NO: 50 - DNA, 48 bp, Artificial sequence
  Primer
taatacgactcactatagggagacttgatgatcaccggcatgttctcg

SEQ ID NO: 51 - DNA, 48 bp, Artificial sequence
  Primer
taatacgactcactatagggagacggagtgccgtcgtagttgacaaaa

SEQ ID NO: 52 - DNA, 48 bp, Artificial sequence
  Primer
taatacgactcactatagggagatgaccaaggaccaaggcctcaatgt

SEQ ID NO: 53 - DNA, 48 bp, Artificial sequence
  Primer
taatacgactcactatagggagaagcccactgtgatggtgcgttctat

SEQ ID NO: 54 - DNA, 48 bp, Artificial sequence
  Primer
taatacgactcactatagggagaatctcatcggctccgaactgcttga

SEQ ID NO: 55 - DNA, 53 bp, Artificial sequence
  Primer
taatacgactcactatagggagacatttaagcaaaatgattgccgccaatagt

SEQ ID NO: 56 - DNA, 48 bp, Artificial sequence
  Primer
taatacgactcactatagggagatctcaatccgatgctggactgtgtg

SEQ ID NO: 57 - DNA, 48 bp, Artificial sequence
  Primer
taatacgactcactatagggagagcccagaaggagcagcaaaagttct

SEQ ID NO: 58 - DNA, 48 bp, Artificial sequence
  Primer
taatacgactcactatagggagataagttacctgcatcgaggcattgt

SEQ ID NO: 59 - DNA, 48 bp, Artificial sequence
  Primer
taatacgactcactatagggagaatgatttatgcgatcgtgatacaca

SEQ ID NO: 60 - DNA, 48 bp, Artificial sequence
  Primer
taatacgactcactatagggagaccgcttctcttccaactgccttttg

SEQ ID NO: 61 - DNA, 48 bp, Artificial sequence
  Primer
taatacgactcactatagggagaggagccgagtacatcaatgccaact

SEQ ID NO: 62 - DNA, 48 bp, Artificial sequence
  Primer
taatacgactcactatagggagaatgtaggtcttaaacatctcgcgct

SEQ ID NO: 63 - DNA, 48 bp, Artificial sequence
  Primer
taatacgactcactatagggagaggaaatctcgcccatggtgctagat

SEQ ID NO: 64 - DNA, 48 bp, Artificial sequence
  Primer
taatacgactcactatagggagatgttccgatccacggtgattacagc

SEQ ID NO: 65 - DNA, 48 bp, Artificial sequence
  Primer
taatacgactcactatagggagatgcccccctggatgataatgccaat

SEQ ID NO: 66 - DNA, 48 bp, Artificial sequence
  Primer
taatacgactcactatagggagaacttgcagctcgtgactctgatgct

SEQ ID NO: 67 - DNA, 53 bp, Artificial sequence
  Primer
taatacgactcactatagggagaatgcttgttaaatttgttgtcatctttgcc

SEQ ID NO: 68 - DNA, 48 bp, Artificial sequence
  Primer
taatacgactcactatagggagaatctcctccgagtcctggaacttga

SEQ ID NO: 69 - DNA, 48 bp, Artificial sequence
  Primer
taatacgactcactatagggagaatgcccagcatcaagttgcaatctt

SEQ ID NO: 70 - DNA, 48 bp, Artificial sequence
  Primer
taatacgactcactatagggagacgaaatgccgcgctttacttctcct

SEQ ID NO: 71 - DNA, 48 bp, Artificial sequence
  Primer
taatacgactcactatagggagatccgatacctgcgcgtctttgacaa

SEQ ID NO: 72 - DNA, 48 bp, Artificial sequence
  Primer
taatacgactcactatagggagagccattattaccaggtccactgctg

SEQ ID NO: 73 - DNA, 48 bp, Artificial sequence
  Primer
taatacgactcactatagggagactcaacgagaaggtccagactcaac

SEQ ID NO: 74 - DNA, 48 bp, Artificial sequence
  Primer
taatacgactcactatagggagatcgacggcatatttctgggtccact

SEQ ID NO: 75 - DNA, 53 bp, Artificial sequence
  Primer
taatacgactcactatagggagaaatgtgcagccttcggtggcggagtacgac

SEQ ID NO: 76 - DNA, 48 bp, Artificial sequence
  Primer
taatacgactcactatagggagacaattactcgctctgagaagctgtc

SEQ ID NO: 77 - DNA, 48 bp, Artificial sequence
  Primer
taatacgactcactatagggagaatgcccttcatggcacatgaccgat

SEQ ID NO: 78 - DNA, 48 bp, Artificial sequence
  Primer
taatacgactcactatagggagattgctgctcttgctgcactagctgt

SEQ ID NO: 79 - DNA, 53 bp, Artificial sequence
  Primer
taatacgactcactatagggagaaataataataacaacgttataagccagccg

SEQ ID NO: 80 - DNA, 48 bp, Artificial sequence
  Primer
taatacgactcactatagggagataatgcggctgcgcaagatgctgtt

SEQ ID NO: 81 - DNA, 48 bp, Artificial sequence
  Primer
taatacgactcactatagggagagccacgttgaaatcgatcaccgaca

SEQ ID NO: 82 - DNA, 48 bp, Artificial sequence
  Primer
taatacgactcactatagggagaatagaaggagttggcgggtggagat

SEQ ID NO: 83 - DNA, 48 bp, Artificial sequence
  Primer
taatacgactcactatagggagatctctttcgatttcttctcttctgt

SEQ ID NO: 84 - DNA, 48 bp, Artificial sequence
  Primer
taatacgactcactatagggagattgatgaacacggcgacgggataca

SEQ ID NO: 85 - DNA, 48 bp, Artificial sequence
  Primer
taatacgactcactatagggagaagggaatcgtgtggaaagactcgca

SEQ ID NO: 86 - DNA, 48 bp, Artificial sequence
  Primer
taatacgactcactatagggagaacaaggacaaatcaacgggactggc

SEQ ID NO: 87 - DNA, 48 bp, Artificial sequence
  Primer
taatacgactcactatagggagatgtttgccatatcattgcagctgct

SEQ ID NO: 88 - DNA, 48 bp, Artificial sequence
  Primer
taatacgactcactatagggagagatgtcatattggccaggtcactgg

SEQ ID NO: 89 - DNA, 10598 bp, Drosophila melanogaster
cttaaccaaacaaacaacctgtgcaacaattgtcaaagtgctaggcgacaaataatttctgaaagaagatttgacaagttccaataacgaaaatatcagaacacactcgaactccaacatagacggatcattggagagttagtgaaaaaaaaaagcgaaaaatcagaaaaactttataaactaatagaaacaatactactcagatttttcgaacgtttttcgtctgcgtttctgtttttttccgaatcgaaagaatcaaactaactctatatgatggccgatcacttagacgaaccgccccaaaagcgggttaaaatggatccaacggatatctcttactttctggaggagaacctgcccgatgagctggtgtcctcgaatagtggctggtcggatcagctgaccggcggagcaggcggtggcaatggaggtggcggcgcctccggtgtaaccacaaatcccacatccggcccaaatcccggtggcggacccaacaagccggcagcccaaggacccggctctggcacaggcggagtcggtgttggagtgaatgtgggtgtcggcggtgttgttggcgtcggcgttgtgccttcccagatgaacggagccggcggcggcaacggatccggaacgggtggcgacgacggcagtggcaacggctcaggagcgggcaacagaatcagtcaaatgcaacaccagcaactgcagcacctactccagcagcagcagcagggccagaagggcgccatggtggtgcccggcatgcagcagctgggcagcaagtcgcccaacctgcagtcacccaaccagggcggcatgcagcaggtggtgggcactcagatgggtatggtcaactcaatgcccatgtcaatatcgaataatggcaacaatggcatgaacgccataccaggcatgaacaccattgcgcagggcaatctgggaaacatggtgctgaccaacagcgttggcggcggcatgggcggcatggttaatcatcttaagcagcagcctggcggcggcggcggtgggatgatcaattccgtttcagtacccggaggacctggagcaggagctggtggcgttggagctggcggcggaggagccgttgccgcaaaccaaggcatgcatatgcagaacggcccaatgatgggacgcatggtggggcaacagcatatgcttcgtggcccgcatctcatgggtgcctctggaggagctggtgggccaggaaacgggcctggtggcggaggaccacgcatgcagaatccgaacatgcaaatgactcaactcaacagtctgccctacggagtgggtcagtatggtggcccaggcggtggtaacaatcctcagcaacagcagcagcaacagcagcaacaacttctcgcccagcagatggcccaaagaggtggcgtcgtaccgggcatgccgcagggtaatcggcccgttggcacagtggtgcccatgtccacactcggcggcgatggatcagggcccgcggggcagctggtaagcgggaatcctcagcagcagcagatgctggcgcagcagcaaaccggagccatgggcccgcgtcctccgcaaccaaaccagctgctcggtcatcccggccagcagcagcagcagcaacagcagcctggcacctcgcagcagcagcaacagcagcagggagtcggaatcggaggagcaggcgttgtggccaatgcaggaaccgtggctggcgtgccggcagtggcaggcggcggagccggtggtgccgtacaatctagcggccctggtggcgccaatcgcgatgtgcccgacgaccgtaagcgacagatccagcagcaactgatgctgctcctccatgcacacaaatgcaatcgcagggagaacctgaatccgaacagggaagtgtgcaacgttaactactgcaaggcgatgaaatccgtgctggcccacatgggcacttgcaaacagagcaaggactgcaccatgcagcattgtgcctcttcgcgccaaattctgttgcattataaaacgtgccagaacagtggctgcgtcatttgctatcccttccggcagaatcattcggtttttcaaaatgcgaatgtgccgccaggaggcggaccggcaggaattggaggtgcgccaccaggtggcggcggagcgggtggtggagcggctggagcaggcggtaatcttcagcagcaacagcagcagcaacaacagcagcagcagaaccagcagcccaatctgacgggtctggtagtggatggcaagcaaggacagcaggttgcaccgggaggtggccaaaatactgccatagttcttccccagcaacagggagcgggcggtgcaccgggtgcgccgaaaacgcctgcggatatggtgcaacaattgacccaacagcagcagcagcagcaacagcaggttcaccagcaacaggttcagcaacaggaactccgtcgattcgatggcatgagccagcaagtcgtagcaggtggtatgcaacagcagcagcagcagggtttgcctcctgtgattcgcattcaaggcgctcagccggccgtcagggtactgggaccaggtggtcccggcggcccaagtggaccaaatgttctgccgaacgatgttaacagcctgcatcaacaacagcaacaaatgctgcaacagcagcagcaacagggccagaatcgacgacgcggtggcctggccaccatggtggagcaacaacagcagcatcagcaacaacagcagcaacccaatcccgcccagctgggtggcaacattccagcaccactctctgtcaacgtcggtggctttggcaataccaatttcggtggtgcagctgccggcggagccgtgggagccaacgataagcagcaactgaaggtggcccaagtgcatccgcagagccatggcgtaggagcgggcggtgcatcagcgggcgccggggcgagtggtggtcaagtggcagccggttccagtgtcctgatgccagccgataccacgggcagtggtaatgcgggcaatcccaaccagaatgcaggcggtgtagctggaggtgccggcggtggcaatggcggaaacactggacctccgggcgacaacgagaaagactggcgggaatcggtgaccgccgatctgcgcaaccacctcgtccacaaactggtgcaggccatcttccccacctcggatcctacgaccatgcaggacaaacggatgcataatctcgtttcatacgcggaaaaggtcgagaaggacatgtacgaaatggccaagtccagatcggagtactatcacctgctggccgagaagatctacaagattcaaaaggagctggaggagaagcgactgaagcgtaaggagcagcatcagcagatgctgatgcagcaacagggcgttgcgaatccagtggctggaggagcggctggcggagcaggcagtgcagctggtgtagcgggcggtgtagtcttgccccagcagcaacagcagcagcaacaacaacagcagcagcagggtcagcagcctctgcagagctgtatccatccaagcatcagtccaatgggcggtgtgatgccgccgcagcagctgcgtccacagggaccacctggaatactgggccaacagacggcagcaggcctgggcgtcggcgtgggagtgaccaacaatatggttaccatgcgcagtcattcgcccggtggcaacatgctcgccttgcagcaacaacagcgcatgcagttcccgcaacaacagcagcaacaaccgccagggtctggagccggcaaaatgctggtcggtccaccaggacccagtcccggtggcatggtggtcaatcccgcgctctcgccttaccagacgaccaatgtgctcaccagtccggtgccaggacagcagcaacagcagcagttcattaatgcgaacggcggcactggcgccaatcctcaactgagcgaaatcatgaagcagcgtcacattcaccagcagcagcagcaacaacaacagcagcagcagcagggaatgttgttgccgcagtcgccatttagcaattcaacacctctacaacaacaacagcagcagcagcagcaacaacagcagcagcaggcgactagcaacagttttagctcaccaatgcagcaacagcagcaaggtcagcaacagcaacaacagaagcccggcagtgtgctgaataatatgccgcccacgcccacgagtctggaagccctgaatgcgggggccggagcgccgggaactggaggatccgcctccaatgtaacggtttcagctccgagcccatcgcctggcttcttgtccaacggcccgtcgattggcacgccctccaacaataataataatagtagtgctaacaacaacccgccctcggtgagcagtctaatgcaacagccgctgagcaatcggccgggtacgcctccttacatacccgcttccccagtgccggcgacaagtgcctccggattagcggcgagcagtacgcccgcatcagcagcagccacctgtgcgagtagtggcagtggcagcaatagcagcagcggagcaactgcagcgggtgcaagttccacgtcatcatcttcctcggcgggctcgggtacaccactcagctcggtatcgactcctacatcggccacgatggccaccagcagcggtggtggtggtggtggtgggggcaatgcaggaggcggatcatccactacgcccgctagcaatccactgctcctcatgtctggaggaacggcaggaggcggaacgggagcaacgaccaccacatcgacatcctcgagcagtcgcatgatgagcagctccagcagtctctcctcacagatggctgccctggaggctgcggcgcgagacaacgacgatgagacgccctcgccatccggcgagaatacgaacggcagtggtggcagtggaaatgccggcggtatggcctccaagggcaaactggactccattaagcaagatgatgatatcaagaaggagtttatggatgacagctgtggcggaaataacgatagctcgcagatggattgctcgacgggtggtggcaagggcaagaatgtgaacaacgacggaacaagcatgatcaaaatggagatcaagacggaggatggactcgatggcgaggtaaagatcaaaacggaggccatggatgtggacgaggctggaggatcgacagccggagagcatcatggcgaaggtggcggcggcagtggtgttggcggcggtaaggataacataaatggtgcgcacgatggcggagcgacaggcggtgctgtggacataaaacccaagacggagacgaaaccactcgtaccggagccactggcacccaatgcaggtgacaagaaaaagaagtgccaattcaatcccgaggaactgcgcaccgctctcctgccaacgctagagaagctctacaggcaggagcccgaatccgtgccctttcgctacccagttgatccccaggcgctgggcatacctgattactttgaaatcgttaagaagcccatggacctgggcactatacgcaccaacatccagaatggaaagtacagtgatccctgggaatatgtggacgacgtttggctgatgttcgacaatgcctggctgtataatcgcaaaacatcgcgggtctatcgctattgcacaaagctttccgaagtctttgaggcggagattgatcctgtgatgcaggcactgggatattgctgcggcaggaagtacacattcaatccacaggtgctatgctgctacggcaagcagctctgcacgattccgcgggatgccaagtactacagctaccagaacagtctaaaggaatacggtgtcgcctcaaatagatacacctactgccaaaagtgctttaacgacatccagggcgatacggtcacactgggcgacgatccactgcaatcgcaaacccaaatcaaaaaggatcagttcaaggagatgaagaacgatcacctcgaactggagccgtttgtcaattgccaggagtgcggacgcaaacagcaccaaatctgcgtactctggctggattctatctggcccggtggcttcgtgtgcgataactgcctgaaaaagaagaactcaaagcggaaggagaacaagttcaatgcgaaacgcctgcccaccaccaagctgggcgtgtacatagagacgcgggtgaataatttcctcaagaagaaggaggctggtgccggcgaggtgcacattcgtgtggtcagctcatcggacaagtgtgtagaggtgaagcccggcatgcgtcgacgattcgtcgagcagggcgagatgatgaacgagttcccataccgagccaaagcgctctttgccttcgaggaggtggatggcatcgatgtgtgcttctttggcatgcacgttcaggagtatggatccgagtgcccggcgccgaatacgcggcgtgtgtatattgcctatttggattccgttcatttcttccggccaagacagtaccgtacagcggtatatcacgaaatcctgctcggctatatggactacgtgaaacagctgggctacacaatggcccatatctgggcctgtccgccatccgagggcgatgactacatctttcactgccatcccacggaccagaagatacccaagcccaagcgcctgcaggagtggtacaaaaagatgcttgacaagggaatgatcgagcgcatcatacaggactacaaggatatcctgaagcaggcgatggaggacaaactgggctctgccgcagagctgccctactttgagggcgacttctggcccaatgtgctggaggagagcatcaaggaactggaccaggaggaggaagagaagcgcaaacaggccgaggccgcggaagcagcagctgcggcaaatcttttctctatcgaggaaaatgaagtaagcggcgatggcaaaaagaagggccagaagaaggccaaaaagtcgaacaaatcgaaagcggcgcagcgtaagaacagcaaaaagtccaacgaacatcagtcgggcaatgatctctccacaaagatatatgcgaccatggagaagcacaaggaggtcttcttcgttatccgtctgcattcggcgcagtcggcagctagtttagcgcccatccaggatcccgatccgctgctcacatgcgatctgatggatggacgcgatgccttcctcacgctcgcccgcgacaagcactttgagttctcgtcgctgcggcgcgcacaattctccactctgtccatgttgtatgagctgcataaccagggtcaggacaagtttgtttacacctgcaaccactgcaagacggccgtggagacgcgctaccactgtactgtttgtgatgacttcgatctgtgtatcgtgtgcaaggagaaggttggccatcagcacaagatggagaagctcggcttcgacatcgacgacggctctgcgctggcggatcacaagcaggctaatccacaggaggcccgcaagcaatccatccagcgttgcatccaatcgctggcgcacgcctgccagtgtcgcgatgccaactgccgcctgccatcgtgccagaagatgaagctcgttgtccagcatacgaagaactgcaagcgcaagcccaacggaggatgccccatttgcaagcagcttatcgcactctgttgctatcacgcgaagaactgtgaggagcagaagtgccccgtgccgttctgtcccaacatcaagcacaagctcaagcagcagcagtcacagcagaaattccagcagcagcagttgctgcgtcgccgtgtggcgctcatgtcgcgtacagcagctccagcggctctgcaaggcccagctgcagtaagcggtccgaccgtcgtctctggaggagtgcccgtggtgggcatgtccggtgtggcagttagccaacaggtgatccccggccaggcgggtatactgcctccaggggcgggtggcatgtcgccatctaccgtggcagttccatcgcctgtttcaggaggagcgggagccggtggaatgggtggaatgacatcaccacatccgcatcaaccaggtataggtatgaaacctggtggcggtcactcgccgtctccaaatgtcctacaagtggtgaagcaggtccaggaagaggcagctcgtcagcaggtatcgcatggcggtggcttcggcaagggcgtacccatggcgccgcccgtaatgaatcgaccaatgggcggcgctgggcccaaccaaaatgttgttaatcaacttggtggcatgggcgttggagttgaaggtgtcggtggtgttggcgtcggaggcgttggtggagtgggtgttaatcaactgaattcgggtggtggcaatacacccggtgcacccatttccggtcccggaatgaatgtcaatcatctaatgtccatggatcagtggggcggtggcggagccggcggcggaggtgccaatcccggcggtggcaatccacaagcccgctatgccaacaataccggcggcatgcgccaacccacccatgtgatgcaaacgaatctgataccgccgcagcaacagcaacagatgatgggcggactgggcggacccaaccaactgggaggtggccaaatgccagtcggcggacagcatggaggaatgggaatgggcatgggagcaccaccaatggccggaactgttggcggagtgcgtccatctcccggagcaggaggtggaggtggaagtgcgactgggggcggtctaaatacgcaacaactcgccctgattatgcaaaagattaagaacaatcccaccaacgagagcaaccagcacatccttgccatactaaaacagaatccgcagatcatggcggcgatcatcaagcagcgccagcagtcgcagaacaatgcggcagcgggcggaggagcacctggcccaggtggagccctacagcagcagcaggccggtaacggaccgcaaaatcctcaacagcagcagcagcagcagcaacagcaacaggtgatgcagcaacagcagatgcagcacatgatgaaccagcagcagggcggcggcggtccacagcagatgaatcccaaccagcagcagcaacagcagcaggttaatctcatgcagcagcagcaacaaggtggacccggaggaccaggttctggacttcccacgcgcatgcccaatatgcccaatgccttgggtatgctgcagagtcttccgcccaacatgtcgccaggcgtttctactcagggaggaatggtgcccaaccaaaactggaacaagatgcgttacatgcaaatgagccagtacccgccaccgtatccgcagcgccagcgtggcccgcacatgggcggagcgggacctggtcccggccagcaacagttccccggtggcggaggtggagcgggcaactttaatgcgggtggtgctggtggtgcaggcggcgttgtcggtgtgggcggagtgcccggaggtgccggcacggtgcccggtggcgatcaatactcgatggcgaatgccgcggctgcctccaatatgctgcaacagcagcagggccaggtgggcgtcggagtgggcgtgggcgtgaaaccaggacccggccaacagcaacagcagatgggcgttggcatgccgccgggtatgcagcagcaacagcagcaacagcaaccgctgcagcagcagcagatgatgcaggtagcaatgccaaatgcgaatgcccagaatccgtcggcggtggttggcggacccaatgctcaggtgatgggtccgccgacgccgcactctctgcagcagcagctgatgcaatcggcccgctcgtcgccgcctattcgctccccgcagccaacgccatcgccacgttcggctccatcgccacgtgctgctccatccgcctcgcctagggcacagccctcgccgcaccatgtgatgagcagtcactcgccagcgccgcagggaccaccgcatgacggcatgcacaatcatggcatgcatcatcagtcgccactgccaggagtgccgcaggatgttggcgtcggagtcggtgtcggcgttggcgttggcgttaacgttaacgtcggcaacgtgggcgtcggcaatgccggaggagccctgcccgacgcctccgaccagctgaccaagtttgtggagcgactctagtgcagcaacagcagcagcaccagcaccagcaccaccaccagctacaatggttggtaggcgatgtggctagagggctagggctagactgaatgaatgaatgagtgtccagtagccgcagacgggatgacgacgaagaccaaccggcagggataaccagtgtgtgttaagcgaattaacaactattactaacttaaatcttttttttttttttaaacggcaccacaaataattgtatattgttataattaaatcaacaaatatcgcgcctaatgtgtactgtagattaagatgacccaccattacaaccactaacaaataccttattatttaagtttaagacgaaagttggacagagcattatgattcgatttccattttatgtccgcgatttagcaaatatataatatcatatatttcatatgcccccaaaacacacacacaccatgtattaattaatgcgattccttcgtttccactaagcagatatagaaaaaaaaaaa

SEQ ID NO: 90 - protein, 3275 aa, Drosophila melanogaster
MMADHLDEPPQKRVKMDPTDISYFLEENLPDELVSSNSGWSDQLTGGAGGGNGGGGASGVTTNPTSGPNPGGGPNKPAAQGPGSGTGGVGVGVNVGVGGVVGVGVVPSQMNGAGGGNGSGTGGDDGSGNGSGAGNRISQMQHQQLQHLLQQQQQGQKGAMVVPGMQQLGSKSPNLQSPNQGGMQQVVGTQMGMVNSMPMSISNNGNNGMNAIPGMNTIAQGNLGNMVLTNSVGGGMGGMVNHLKQQPGGGGGGMINSVSVPGGPGAGAGGVGAGGGGAVAANQGMHMQNGPMMGRMVGQQHMLRGPHLMGASGGAGGPGNGPGGGGPRMQNPNMQMTQLNSLPYGVGQYGGPGGGNNPQQQQQQQQQQLLAQQMAQRGGVVPGMPQGNRPVGTVVPMSTLGGDGSGPAGQLVSGNPQQQQMLAQQQTGAMGPRPPQPNQLLGHPGQQQQQQQQPGTSQQQQQQQGVGIGGAGVVANAGTVAGVPAVAGGGAGGAVQSSGPGGANRDVPDDRKRQIQQQLMLLLHAHKCNRRENLNPNREVCNVNYCKAMKSVLAHMGTCKQSKDCTMQHCASSRQILLHYKTCQNSGCVICYPFRQNHSVFQNANVPPGGGPAGIGGAPPGGGGAGGGAAGAGGNLQQQQQQQQQQQQNQQPNLTGLVVDGKQGQQVAPGGGQNTAIVLPQQQGAGGAPGAPKTPADMVQQLTQQQQQQQQQVHQQQVQQQELRRFDGMSQQVVAGGMQQQQQQGLPPVIRIQGAQPAVRVLGPGGPGGPSGPNVLPNDVNSLHQQQQQMLQQQQQQGQNRRRGGLATMVEQQQQHQQQQQQPNPAQLGGNIPAPLSVNVGGFGNTNFGGAAAGGAVGANDKQQLKVAQVHPQSHGVGAGGASAGAGASGGQVAAGSSVLMPADTTGSGNAGNPNQNAGGVAGGAGGGNGGNTGPPGDNEKDWRESVTADLRNHLVHKLVQAIFPTSDPTTMQDKRMHNLVSYAEKVEKDMYEMAKSRSEYYHLLAEKIYKIQKELEEKRLKRKEQHQQMLMQQQGVANPVAGGAAGGAGSAAGVAGGVVLPQQQQQQQQQQQQQGQQPLQSCIHPSISPMGGVMPPQQLRPQGPPGILGQQTAAGLGVGVGVTNNMVTMRSHSPGGNMLALQQQQRMQFPQQQQQQPPGSGAGKMLVGPPGPSPGGMVVNPALSPYQTTNVLTSPVPGQQQQQQFINANGGTGANPQLSEIMKQRHIHQQQQQQQQQQQQGMLLPQSPFSNSTPLQQQQQQQQQQQQQQATSNSFSSPMQQQQQGQQQQQQKPGSVLNNMPPTPTSLEALNAGAGAPGTGGSASNVTVSAPSPSPGFLSNGPSIGTPSNNNNNSSANNNPPSVSSLMQQPLSNRPGTPPYIPASPVPATSASGLAASSTPASAAATCASSGSGSNSSSGATAAGASSTSSSSSAGSGTPLSSVSTPTSATMATSSGGGGGGGGNAGGGSSTTPASNPLLLMSGGTAGGGTGATTTTSTSSSSRMMSSSSSLSSQMAALEAAARDNDDETPSPSGENTNGSGGSGNAGGMASKGKLDSIKQDDDIKKEFMDDSCGGNNDSSQMDCSTGGGKGKNVNNDGTSMIKMEIKTEDGLDGEVKIKTEAMDVDEAGGSTAGEHHGEGGGGSGVGGGKDNINGAHDGGATGGAVDIKPKTETKPLVPEPLAPNAGDKKKKCQFNPEELRTALLPTLEKLYRQEPESVPFRYPVDPQALGIPDYFEIVKKPMDLGTIRTNIQNGKYSDPWEYVDDVWLMFDNAWLYNRKTSRVYRYCTKLSEVFEAEIDPVMQALGYCCGRKYTFNPQVLCCYGKQLCTIPRDAKYYSYQNSLKEYGVASNRYTYCQKCFNDIQGDTVTLGDDPLQSQTQIKKDQFKEMKNDHLELEPFVNCQECGRKQHQICVLWLDSIWPGGFVCDNCLKKKNSKRKENKFNAKRLPTTKLGVYIETRVNNFLKKKEAGAGEVHIRVVSSSDKCVEVKPGMRRRFVEQGEMMNEFPYRAKALFAFEEVDGIDVCFFGMHVQEYGSECPAPNTRRVYIAYLDSVHFFRPRQYRTAVYHEILLGYMDYVKQLGYTMAHIWACPPSEGDDYIFHCHPTDQKIPKPKRLQEWYKKMLDKGMIERIIQDYKDILKQAMEDKLGSAAELPYFEGDFWPNVLEESIKELDQEEEEKRKQAEAAEAAAAANLFSIEENEVSGDGKKKGQKKAKKSNKSKAAQRKNSKKSNEHQSGNDLSTKIYATMEKHKEVFFVIRLHSAQSAASLAPIQDPDPLLTCDLMDGRDAFLTLARDKHFEFSSLRRAQFSTLSMLYELHNQGQDKFVYTCNHCKTAVETRYHCTVCDDFDLCIVCKEKVGHQHKMEKLGFDIDDGSALADHKQANPQEARKQSIQRCIQSLAHACQCRDANCRLPSCQKMKLVVQHTKNCKRKPNGGCPICKQLIALCCYHAKNCEEQKCPVPFCPNIKHKLKQQQSQQKFQQQQLLRRRVALMSRTAAPAALQGPAAVSGPTVVSGGVPVVGMSGVAVSQQVIPGQAGILPPGAGGMSPSTVAVPSPVSGGAGAGGMGGMTSPHPHQPGIGMKPGGGHSPSPNVLQVVKQVQEEAARQQVSHGGGFGKGVPMAPPVMNRPMGGAGPNQNVVNQLGGMGVGVEGVGGVGVGGVGGVGVNQLNSGGGNTPGAPISGPGMNVNHLMSMDQWGGGGAGGGGANPGGGNPQARYANNTGGMRQPTHVMQTNLIPPQQQQQMMGGLGGPNQLGGGQMPVGGQHGGMGMGMGAPPMAGTVGGVRPSPGAGGGGGSATGGGLNTQQLALIMQKIKNNPTNESNQHILAILKQNPQIMAAIIKQRQQSQNNAAAGGGAPGPGGALQQQQAGNGPQNPQQQQQQQQQQQVMQQQQMQHMMNQQQGGGGPQQMNPNQQQQQQQVNLMQQQQQGGPGGPGSGLPTRMPNMPNALGMLQSLPPNMSPGVSTQGGMVPNQNWNKMRYMQMSQYPPPYPQRQRGPHMGGAGPGPGQQQFPGGGGGAGNFNAGGAGGAGGVVGVGGVPGGAGTVPGGDQYSMANAAAASNMLQQQQGQVGVGVGVGVKPGPGQQQQQMGVGMPPGMQQQQQQQQPLQQQQMMQVAMPNANAQNPSAVVGGPNAQVMGPPTPHSLQQQLMQSARSSPPIRSPQPTPSPRSAPSPRAAPSASPRAQPSPHHVMSSHSPAPQGPPHDGMHNHGMHHQSPLPGVPQDVGVGVGVGVGVGVNVNVGNVGVGNAGGALPDASDQLTKFVERL

SEQ ID NO: 91 - DNA, 8147 bp, Homo sapiens
tccgaattccttttttttaattgaggaatcaacagccgccatcttgtcgcggacccgaccggggcttcgagcgcgatctactcggccccgccggtcccgggccccacaaccgcccgcgcaccccgctccgcccggccggcccgctccgcccggccctcggcgcccgccccggcggccccgctcgcctctcggctcggcctcccggagcccggcggcggcggcggcggcagcggcggcggcggcggcggaacggggggtgggggggccgcggcggcggcggcgaccccgctcggcgcattgtttttcctcacggcggcggcggcggcgggccgcgggccgggagcggagcccggagccccctcgtcgtcgggccgcgagcgaattcattaagtggggcgcggggggggagcgaggcggcggcggcggcggcaccatgttctcggggactgcctgagccgcccggccgggcgccgtcgctgccagccgggcccgggggggcggccgggccgccggggcgcccccaccgcggagtgtcgcgctcgggaggcgggcaggggatgagggggccgcggccggcggcggcggcggcggccgggggcgggcggtgagcgctgcggggcgctgttgctgtggctgagatttggccgccgcctcccccacccggcctgcgccctccctctccctcggcgcccgcccgcgccgctcgcggcgcccgcgctcgctcctctccctcgcagccggcagggcccccgacccccgtccgggccctcgccggcccggccgcccgtgcccggggctgttttcgcgagcaggtgaaaatggctgagaacttgctggacggaccgcccaaccccaaaagagccaaactcagctcgcccggtttctcggcgaatgacagcacagattttggatcattgtttgacttggaaaatgatcttcctgatgagctgatacccaatggaggagaattaggccttttaaacagtgggaaccttgttccagatgctgcttccaaacataaacaactgtcggagcttctacgaggaggcagcggctctagtatcaacccaggaataggaaatgtgagcgccagcagccccgtgcagcagggcctgggtggccaggctcaagggcagccgaacagtgctaacatggccagcctcagtgccatgggcaagagccctctgagccagggagattcttcagcccccagcctgcctaaacaggcagccagcacctctgggcccacccccgctgcctcccaagcactgaatccgcaagcacaaaagcaagtggggctggcgactagcagccctgccacgtcacagactggacctggtatctgcatgaatgctaactttaaccagacccacccaggcctcctcaatagtaactctggccatagcttaattaatcaggcttcacaagggcaggcgcaagtcatgaatggatctcttggggctgctggcagaggaaggggagctggaatgccgtaccctactccagccatgcagggcgcctcgagcagcgtgctggctgagaccctaacgcaggtttccccgcaaatgactggtcacgcgggactgaacaccgcacaggcaggaggcatggccaagatgggaataactgggaacacaagtccatttggacagccctttagtcaagctggagggcagccaatgggagccactggagtgaacccccagttagccagcaaacagagcatggtcaacagtttgcccaccttccctacagatatcaagaatacttcagtcaccaacgtgccaaatatgtctcagatgcaaacatcagtgggaattgtacccacacaagcaattgcaacaggccccactgcagatcctgaaaaacgcaaactgatacagcagcagctggttctactgcttcatgctcataagtgtcagagacgagagcaagcaaacggagaggttcgggcctgctcgctcccgcattgtcgaaccatgaaaaacgttttgaatcacatgacgcattgtcaggctgggaaagcctgccaagttgcccattgtgcatcttcacgacaaatcatctctcattggaagaactgcacacgacatgactgtcctgtttgcctccctttgaaaaatgccagtgacaagcgaaaccaacaaaccatcctggggtctccagctagtggaattcaaaacacaattggttctgttggcacagggcaacagaatgccacttctttaagtaacccaaatcccatagaccccagctccatgcagcgagcctatgctgctctcggactcccctacatgaaccagccccagacgcagctgcagcctcaggttcctggccagcaaccagcacagcctcaaacccaccagcagatgaggactctcaaccccctgggaaataatccaatgaacattccagcaggaggaataacaacagatcagcagcccccaaacttgatttcagaatcagctcttccgacttccctgggggccacaaacccactgatgaacgatggctccaactctggtaacattggaaccctcagcactataccaacagcagctcctccttctagcaccggtgtaaggaaaggctggcacgaacatgtcactcaggacctgcggagccatctagtgcataaactcgtccaagccatcttcccaacacctgatcccgcagctctaaaggatcgccgcatggaaaacctggtagcctatgctaagaaagtggaaggggacatgtacgagtctgccaacagcagggatgaatattatcacttattagcagagaaaatctacaagatacaaaaagaactagaagaaaaacggaggtcgcgtttacataaacaaggcatcttggggaaccagccagccttaccagccccgggggctcagccccctgtgattccacaggcacaacctgtgagacctccaaatggacccctgtccctgccagtgaatcgcatgcaagtttctcaagggatgaattcatttaaccccatgtccttggggaacgtccagttgccacaagcacccatgggacctcgtgcagcctccccaatgaaccactctgtccagatgaacagcatgggctcagtgccagggatggccatttctccttcccgaatgcctcagcctccgaacatgatgggtgcacacaccaacaacatgatggcccaggcgcccgctcagagccagtttctgccacagaaccagttcccgtcatccagcggggcgatgagtgtgggcatggggcagccgccagcccaaacaggcgtgtcacagggacaggtgcctggtgctgctcttcctaaccctctcaacatgctggggcctcaggccagccagctaccttgccctccagtgacacagtcaccactgcacccaacaccgcctcctgcttccacggctgctggcatgccatctctccagcacacgacaccacctgggatgactcctccccagccagcagctcccactcagccatcaactcctgtgtcgtcttccgggcagactcccaccccgactcctggctcagtgcccagtgctacccaaacccagagcacccctacagtccaggcagcagcccaggcccaggtgaccccgcagcctcaaaccccagttcagcccccgtctgtggctacccctcagtcatcgcagcaacagccgacgcctgtgcacgcccagcctcctggcacaccgctttcccaggcagcagccagcattgataacagagtccctaccccctcctcggtggccagcgcagaaaccaattcccagcagccaggacctgacgtacctgtgctggaaatgaagacggagacccaagcagaggacactgagcccgatcctggtgaatccaaaggggagcccaggtctgagatgatggaggaggatttgcaaggagcttcccaagttaaagaagaaacagacatagcagagcagaaatcagaaccaatggaagtggatgaaaagaaacctgaagtgaaagtagaagttaaagaggaagaagagagtagcagtaacggcacagcctctcagtcaacatctccttcgcagccgcgcaaaaaaatctttaaaccagaggagttacgccaggccctcatgccaaccctagaagcactgtatcgacaggacccagagtcattacctttccggcagcctgtagatccccagctcctcggaattccagactattttgacatcgtaaagaatcccatggacctctccaccatcaagcggaagctggacacagggcaataccaagagccctggcagtacgtggacgacgtctggctcatgttcaacaatgcctggctctataatcgcaagacatcccgagtctataagttttgcagtaagcttgcagaggtctttgagcaggaaattgaccctgtcatgcagtcccttggatattgctgtggacgcaagtatgagttttccccacagactttgtgctgctatgggaagcagctgtgtaccattcctcgcgatgctgcctactacagctatcagaataggtatcatttctgtgagaagtgtttcacagagatccagggcgagaatgtgaccctgggtgacgacccttcacagccccagacgacaatttcaaaggatcagtttgaaaagaagaaaaatgataccttagaccccgaacctttcgttgattgcaaggagtgtggccggaagatgcatcagatttgcgttctgcactatgacatcatttggccttcaggttttgtgtgcgacaactgcttgaagaaaactggcagacctcgaaaagaaaacaaattcagtgctaagaggctgcagaccacaagactgggaaaccacttggaagaccgagtgaacaaatttttgcggcgccagaatcaccctgaagccggggaggtttttgtccgagtggtggccagctcagacaagacggtggaggtcaagcccgggatgaagtcacggtttgtggattctggggaaatgtctgaatctttcccatatcgaaccaaagctctgtttgcttttgaggaaattgacggcgtggatgtctgcttttttggaatgcacgtccaagaatacggctctgattgcccccctccaaacacgaggcgtgtgtacatttcttatctggatagtattcatttcttccggccacgttgcctccgcacagccgtttaccatgagatccttattggatatttagagtatgtgaagaaattagggtatgtgacagggcacatctgggcctgtcctccaagtgaaggagatgattacatcttccattgccacccacctgatcaaaaaatacccaagccaaaacgactgcaggagtggtacaaaaagatgctggacaaggcgtttgcagagcggatcatccatgactacaaggatattttcaaacaagcaactgaagacaggctcaccagtgccaaggaactgccctattttgaaggtgatttctggcccaatgtgttagaagagagcattaaggaactagaacaagaagaagaggagaggaaaaaggaagagagcactgcagccagtgaaaccactgagggcagtcagggcgacagcaagaatgccaagaagaagaacaacaagaaaaccaacaagaacaaaagcagcatcagccgcgccaacaagaagaagcccagcatgcccaacgtgtccaatgacctgtcccagaagctgtatgccaccatggagaagcacaaggaggtcttcttcgtgatccacctgcacgctgggcctgtcatcaacaccctgccccccatcgtcgaccccgaccccctgctcagctgtgacctcatggatgggcgcgacgccttcctcaccctcgccagagacaagcactgggagttctcctccttgcgccgctccaagtggtccacgctctgcatgctggtggagctgcacacccagggccaggaccgctttgtctacacctgcaacgagtgcaagcaccacgtggagacgcgctggcactgcactgtgtgcgaggactacgacctctgcatcaactgctataacacgaagagccatgcccataagatggtgaagtgggggctgggcctggatgacgagggcagcagccagggcgagccacagtcaaagagcccccaggagtcacgccggctgagcatccagcgctgcatccagtcgctggtgcacgcgtgccagtgccgcaacgccaactgctcgctgccatcctgccagaagatgaagcgggtggtgcagcacaccaagggctgcaaacgcaagaccaacgggggctgcccggtgtgcaagcagctcatcgccctctgctgctaccacgccaagcactgccaagaaaacaaatgccccgtgcccttctgcctcaacatcaaacacaagctccgccagcagcagatccagcaccgcctgcagcaggcccagctcatgcgccggcggatggccaccatgaacacccgcaacgtgcctcagcagagtctgccttctcctacctcagcaccgcccgggacccccacacagcagcccagcacaccccagacgccgcagccccctgcccagccccaaccctcacccgtgagcatgtcaccagctggcttccccagcgtggcccggactcagccccccaccacggtgtccacagggaagcctaccagccaggtgccggcccccccacccccggcccagccccctcctgcagcggtggaagcggctcggcagatcgagcgtgaggcccagcagcagcagcacctgtaccgggtgaacatcaacaacagcatgcccccaggacgcacgggcatggggaccccggggagccagatggcccccgtgagcctgaatgtgccccgacccaaccaggtgagcgggcccgtcatgcccagcatgcctcccgggcagtggcagcaggcgccccttccccagcagcagcccatgccaggcttgcccaggcctgtgatatccatgcaggcccaggcggccgtggctgggccccggatgcccagcgtgcagccacccaggagcatctcacccagcgctctgcaagacctgctgcggaccctgaagtcgcccagctcccctcagcagcaacagcaggtgctgaacattctcaaatcaaacccgcagctaatggcagctttcatcaaacagcgcacagccaagtacgtggccaatcagcccggcatgcagccccagcctggcctccagtcccagcccggcatgcaaccccagcctggcatgcaccagcagcccagcctgcagaacctgaatgccatgcaggctggcgtgccgcggcccggtgtgcctccacagcagcaggcgatgggaggcctgaacccccagggccaggccttgaacatcatgaacccaggacacaaccccaacatggcgagtatgaatccacagtaccgagaaatgttacggaggcagctgctgcagcagcagcagcaacagcagcagcaacaacagcagcaacagcagcagcagcaagggagtgccggcatggctgggggcatggcggggcacggccagttccagcagcctcaaggacccggaggctacccaccggccatgcagcagcagcagcgcatgcagcagcatctccccctccagggcagctccatgggccagatggcggctcagatgggacagcttggccagatggggcagccggggctgggggcagacagcacccccaacatccagcaagccctgcagcagcggattctgcagcaacagcagatgaagcagcagattgggtccccaggccagccgaaccccatgagcccccagcaacacatgctctcaggacagccacaggcctcgcatctccctggccagcagatcgccacgtcccttagtaaccaggtgcggtctccagcccctgtccagtctccacggccccagtcccagcctccacattccagcccgtcaccacggatacagccccagccttcgccacaccacgtctcaccccagactggttccccccaccccggactcgcagtcaccatggccagctccatagatcagggacacttggggaaccccgaacagagtgcaatgctcccccagctgaacacccccagcaggagtgcgctgtccagcgaactgtccctggtcggggacaccacgggggacacgctagagaagtttgtggagggcttgtag

SEQ ID NO: 92 - protein, 2442 aa, Homo sapiens
MAENLLDGPPNPKRAKLSSPGFSANDSTDFGSLFDLENDLPDELIPNGGELGLLNSGNLVPDAASKHKQLSELLRGGSGSSINPGIGNVSASSPVQQGLGGQAQGQPNSANMASLSAMGKSPLSQGDSSAPSLPKQAASTSGPTPAASQALNPQAQKQVGLATSSPATSQTGPGICMNANFNQTHPGLLNSNSGHSLINQASQGQAQVMNGSLGAAGRGRGAGMPYPTPAMQGASSSVLAETLTQVSPQMTGHAGLNTAQAGGMAKMGITGNTSPFGQPFSQAGGQPMGATGVNPQLASKQSMVNSLPTFPTDIKNTSVTNVPNMSQMQTSVGIVPTQAIATGPTADPEKRKLIQQQLVLLLHAHKCQRREQANGEVRACSLPHCRTMKNVLNHMTHCQAGKACQVAHCASSRQIISHWKNCTRHDCPVCLPLKNASDKRNQQTILGSPASGIQNTIGSVGTGQQNATSLSNPNPIDPSSMQRAYAALGLPYMNQPQTQLQPQVPGQQPAQPQTHQQMRTLNPLGNNPMNIPAGGITTDQQPPNLISESALPTSLGATNPLMNDGSNSGNIGTLSTIPTAAPPSSTGVRKGWHEHVTQDLRSHLVHKLVQAIFPTPDPAALKDRRMENLVAYAKKVEGDMYESANSRDEYYHLLAEKIYKIQKELEEKRRSRLHKQGILGNQPALPAPGAQPPVIPQAQPVRPPNGPLSLPVNRMQVSQGMNSFNPMSLGNVQLPQAPMGPRAASPMNHSVQMNSMGSVPGMAISPSRMPQPPNMMGAHTNNMMAQAPAQSQFLPQNQFPSSSGAMSVGMGQPPAQTGVSQGQVPGAALPNPLNMLGPQASQLPCPPVTQSPLHPTPPPASTAAGMPSLQHTTPPGMTPPQPAAPTQPSTPVSSSGQTPTPTPGSVPSATQTQSTPTVQAAAQAQVTPQPQTPVQPPSVATPQSSQQQPTPVHAQPPGTPLSQAAASIDNRVPTPSSVASAETNSQQPGPDVPVLEMKTETQAEDTEPDPGESKGEPRSEMMEEDLQGASQVKEETDIAEQKSEPMEVDEKKPEVKVEVKEEEESSSNGTASQSTSPSQPRKKIFKPEELRQALMPTLEALYRQDPESLPFRQPVDPQLLGIPDYFDIVKNPMDLSTIKRKLDTGQYQEPWQYVDDVWLMFNNAWLYNRKTSRVYKFCSKLAEVFEQEIDPVMQSLGYCCGRKYEFSPQTLCCYGKQLCTIPRDAAYYSYQNRYHFCEKCFTEIQGENVTLGDDPSQPQTTISKDQFEKKKNDTLDPEPFVDCKECGRKMHQICVLHYDIIWPSGFVCDNCLKKTGRPRKENKFSAKRLQTTRLGNHLEDRVNKFLRRQNHPEAGEVFVRVVASSDKTVEVKPGMKSRFVDSGEMSESFPYRTKALFAFEEIDGVDVCFFGMHVQEYGSDCPPPNTRRVYISYLDSIHFFRPRCLRTAVYHEILIGYLEYVKKLGYVTGHIWACPPSEGDDYIFHCHPPDQKIPKPKRLQEWYKKMLDKAFAERIIHDYKDIFKQATEDRLTSAKELPYFEGDFWPNVLEESIKELEQEEEERKKEESTAASETTEGSQGDSKNAKKKNNKKTNKNKSSISRANKKKPSMPNVSNDLSQKLYATMEKHKEVFFVIHLHAGPVINTLPPIVDPDPLLSCDLMDGRDAFLTLARDKHWEFSSLRRSKWSTLCMLVELHTQGQDRFVYTCNECKHHVETRWHCTVCEDYDLCINCYNTKSHAHKMVKWGLGLDDEGSSQGEPQSKSPQESRRLSIQRCIQSLVHACQCRNANCSLPSCQKMKRVVQHTKGCKRKTNGGCPVCKQLIALCCYHAKHCQENKCPVPFCLNIKHKLRQQQIQHRLQQAQLMRRRMATMNTRNVPQQSLPSPTSAPPGTPTQQPSTPQTPQPPAQPQPSPVSMSPAGFPSVARTQPPTTVSTGKPTSQVPAPPPPAQPPPAAVEAARQIEREAQQQQHLYRVNINNSMPPGRTGMGTPGSQMAPVSLNVPRPNQVSGPVMPSMPPGQWQQAPLPQQQPMPGLPRPVISMQAQAAVAGPRMPSVQPPRSISPSALQDLLRTLKSPSSPQQQQQVLNILKSNPQLMAAFIKQRTAKYVANQPGMQPQPGLQSQPGMQPQPGMHQQPSLQNLNAMQAGVPRPGVPPQQQAMGGLNPQGQALNIMNPGHNPNMASMNPQYREMLRRQLLQQQQQQQQQQQQQQQQQQGSAGMAGGMAGHGQFQQPQGPGGYPPAMQQQQRMQQHLPLQGSSMGQMAAQMGQLGQMGQPGLGADSTPNIQQALQQRILQQQQMKQQIGSPGQPNPMSPQQHMLSGQPQASHLPGQQIATSLSNQVRSPAPVQSPRPQSQPPHSSPSPRIQPQPSPHHVSPQTGSPHPGLAVTMASSIDQGHLGNPEQSAMLPQLNTPSRSALSSELSLVGDTTGDTLEKFVEGL

SEQ ID NO: 93 - DNA, 1363 bp, Drosophila melanogaster
taaagtgcaagctggaaaagaaaagcaaaacaaattccggagagcagaaagagagtttttcaagtgaacgcgtccaactgtttttgaagcgaagcgcttaggcggaggagcagctagccaggatggacaagatgcggatattgaaggaaagtcgccccgagataatcgtcggtggcaaatatcgggtgatcaggaagattggaagcggatcgtttggcgacatttacctgggcatgagcatccagagcggcgaagaagtggccatcaagatggagagcgcccacgcccgccatccgcagctgttgtacgaggccaagctgtaccgcattctgagcggcggcgttggattccctcgtatacgtcaccatggcaaggaaaagaacttcaacaccctggtcatggacctgctgggaccctcgctggaggatctgttcaatttctgtacgcgccatttcacaatcaaaacggttctgatgctcgtcgaccagatgatcggacgcttggagtacatccatctcaagtgcttcatccatcgcgacatcaagccggataacttcctaatgggcattggtcggcactgcaataagctgttcctgatcgatttcggtctggccaagaagttccgcgatccgcacacgcgccatcacatcgtttaccgcgaggacaagaacctcaccggcactgcccgctatgcctcgatcaatgcccatctgggcatcgagcagtcgcggcgtgacgacatggaatcgcttggatacgtgatgatgtacttcaatcgcggcgtactgccatggcaaggcatgaaggccaacaccaagcagcagaaatacgagaagatctccgaaaagaagatgtccacgcccatcgaggtcctctgcaagggctcgccggccgagttctccatgtatctgaactattgtcgtagcctgcgcttcgaggagcagccagattacatgtacctacgtcaattgttccgcatactgttcagaacgctgaaccatcagtatgactacatctacgactggacaatgctgaagcagaagacccatcagggtcaacccaatccagctatactcttggagcaattggacaaggacaaggagaagcagaacggcaagcccctgatcgcggactaagagctgcagcgcattcagacgaatggggggagtgcatcagagaaggagaacgtggatgcgtggatgtaaatgacgttgatgtgggcgaaaggcccggcaaggagcggagcaaatatgaaacagacgcaaccgtaaaattgagtaacaccagcggtcgtccgaatgtttcttaatattaatttaaattcaatactaaacaaataaggaaccacaaacaagcaagcaac

SEQ ID NO: 94 - protein, 337 aa, Drosophila melanogaster
MDKMRILKESRPEIIVGGKYRVIRKIGSGSFGDIYLGMSIQSGEEVAIKMESAHARHPQLLYEAKLYRILSGGVGFPRIRHHGKEKNFNTLVMDLLGPSLEDLFNFCTRHFTIKTVLMLVDQMIGRLEYIHLKCFIHRDIKPDNFLMGIGRHCNKLFLIDFGLAKKFRDPHTRHHIVYREDKNLTGTARYASINAHLGIEQSRRDDMESLGYVMMYFNRGVLPWQGMKANTKQQKYEKISEKKMSTPIEVLCKGSPAEFSMYLNYCRSLRFEEQPDYMYLRQLFRILFRTLNHQYDYIYDWTMLKQKTHQGQPNPAILLEQLDKDKEKQNGKPLIAD

SEQ ID NO: 95 - DNA, 1661 bp, Drosophila melanogaster
tttggttgaacctatcgggccctatcgatataagcaaaagcatttttgctggatctaccattttattttagttaataaaatacatatatttcctctctttttgttccgtttgtgcgcgtacaaaactagctgcgaactcgtgcaatatttcataaactgaatgggaaaacaacgataacgacgaaagaaaacgaaaacggatctgcgacgaaattttccccgttccgtttttttttctccaccagcagcagaagcagcagagcaaaagcagcgaatatatttgtaaaagagagccccaaccttgagaaaaaacaaccagcagggcaataattagttgaatttatcgtctgctgtttttcaagtgaacgcgtccaactgtttttgaagcgaagcgcttaggcggaggagcagctagccaggatggacaagatgcggatattgaaggaaagtcgccccgagataatcgtcggtggcaaatatcgggtgatcaggaagattggaagcggatcgtttggcgacatttacctgggcatgagcatccagagcggcgaagaagtggccatcaagatggagagcgcccacgcccgccatccgcagctgttgtacgaggccaagctgtaccgcattctgagcggcggcgttggattccctcgtatacgtcaccatggcaaggaaaagaacttcaacaccctggtcatggacctgctgggaccctcgctggaggatctgttcaatttctgtacgcgccatttcacaatcaaaacggttctgatgctcgtcgaccagatgatcggacgcttggagtacatccatctcaagtgcttcatccatcgcgacatcaagccggataacttcctaatgggcattggtcggcactgcaataagctgttcctgatcgatttcggtctggccaagaagttccgcgatccgcacacgcgccatcacatcgtttaccgcgaggacaagaacctcaccggcactgcccgctatgcctcgatcaatgcccatctgggcatcgagcagtcgcggcgtgacgacatggaatcgcttggatacgtgatgatgtacttcaatcgcggcgtactgccatggcaaggcatgaaggccaacaccaagcagcagaaatacgagaagatctccgaaaagaagatgtccacgcccatcgaggtcctctgcaagggctcgccggccgagttctccatgtatctgaactattgtcgtagcctgcgcttcgaggagcagccagattacatgtacctacgtcaattgttccgcatactgttcagaacgctgaaccatcagtatgactacatctacgactggacaatgctgaagcagaagacccatcagggtcaacccaatccagctatactcttggagcaattggacaaggacaaggagaagcagaacggcaagcccctgatcgcggactaagagctgcagcgcattcagacgaatggggggagtgcatcagagaaggagaacgtggatgcgtggatgtaaatgacgttgatgtgggcgaaaggcccggcaaggagcggagcaaatatgaaacagacgcaaccgtaaaattgagtaacaccagcggtcgtccgaatgtttcttaatattaatttaaattcaatactaaacaaataaggaaccacaaacaagcaagcaac

SEQ ID NO: 96 - protein, 337 aa, Drosophila melanogaster; identical to SEQ ID NO: 94

SEQ ID NO: 97 - DNA, 1259 bp, Homo sapiens
ccgcctccgtgttccgtttcctgccgccctcctctcgtagccttgcctagtgtggagccccaggcctccgtcctcttcccagaggtgtcgaggcttggccccagcctccatcttcgtctctcaggatggcgagtagcagcggctccaaggctgaattcattgtcggtgggaaatataaactggtacggaagatcgggtctggctccttcggggacatctatttggcgatcaacatcaccaacggcgaggaagtggcactgaagctagaatctcagaaggccaggcatccccagttgctgtacgagagcaagctctataagattcttcaaggtggggttggcatcccccacatacggtggtatggtcaggaaaaagactacaatgtactagtcatggatcttctgggacctagcctcgaagacctcttcaatttctgttcaagaaggttcacaatgaaaactgtacttatgttagctgaccagatgatcagtagaattgaatatgtgcatacaaagaattttatacacagagacattaaaccagataacttcctaatgggtattgggcgtcactgtaataagttattccttattgattttggtttggccaaaaagtacagagacaacaggacaaggcaacacataccatacagagaagataaaaacctcactggcactgcccgatatgctagcatcaatgcacatcttggtattgagcagagtcgccgagatgacatggaatcattaggatatgttttgatgtattttaatagaaccagcctgccatggcaagggctaaaggctgcaacaaagaaacaaaaatatgaaaagattagtgaaaagaagatgtccacgcctgttgaagttttatgtaaggggtttcctgcagaatttgcgatgtacttaaactattgtcgtgggctacgctttgaggaagccccagattacatgtatctgaggcagctattccgcattcttttcaggaccctgaaccatcaatatgactacacatttgattggacaatgttaaagcagaaagcagcacagcaggcagcctcttcaagtgggcagggtcagcaggcccaaacccccacaggcaagcaaactgacaaatccaagagtaacatgaaaggtttctaatttctaagcatgaattgaggaacagaagaagcagacgagatgatcggagcagcatttgtttctccccaaatctagaaattttagttcatatgtacactagccagtggttgtggacaacca

SEQ ID NO: 98 - protein, 337 aa, Homo sapiens
MASSSGSKAEFIVGGKYKLVRKIGSGSFGDIYLAINITNGEEVALKLESQKARHPQLLYESKLYKILQGGVGIPHIRWYGQEKDYNVLVMDLLGPSLEDLFNFCSRRFTMKTVLMLADQMISRIEYVHTKNFIHRDIKPDNFLMGIGRHCNKLFLIDFGLAKKYRDNRTRQHIPYREDKNLTGTARYASINAHLGIEQSRRDDMESLGYVLMYFNRTSLPWQGLKAATKKQKYEKISEKKMSTPVEVLCKGFPAEFAMYLNYCRGLRFEEAPDYMYLRQLFRILFRTLNHQYDYTFDWTMLKQKAAQQAASSSGQGQQAQTPTGKQTDKSKSNMKGF

SEQ ID NO: 99 - DNA, 332 bp, Drosophila melanogaster
gatcagacgatattcggactccaagcagagcactttgaaggtgagttcgccggaaaccaggcaaagcgccattcgccattcaggctgcgcaactgttgggaagggcgatcggtgcgggcctcttcgctattacgccagctggcgaaagggggatgtgctgcaaggcgattaagttgggtaacgccagggttttcccagtcacgacgttgtaaaacgacggccagtgccaagctctgctgctctaaacgacgcatttcgtactccaaagtacgaattttttccctcaagctcttattttcattaaacaatgaacaggacctaacgccacagta

SEQ ID NO: 100 - DNA, 1861 bp, Drosophila melanogaster
gtaaatgttgtttaccaacgtaacgcgtgttttcgcttcgttgtattttcggtgtcgaatattttggatgctggccaagagatagcgcagcgatcgggtcggaactcttgggcggacttatcactgggtcggtcaggggtcacgggttatcgttatcgcttatcagccagcggcggcgtcatctcagcgccggcgactcttctcactttgcggcagttccgattcgaacgcagccgtttacaaagacatgcagcgggcgcgctctacactgacacaaaagcttcggttttgccttagtcgggacctgaacaccaaagttggcaacccggttaacttcgagactggaaagcttagcggagctttaactcgcatcgccgccaaaaaacaaccatcaccaacgccattcttaccggcgatcagacgatattcggactccaagcagagcactttgaagaatatggccgatcagaaactgctgcaaaccccgctggcacagggcgatccggagctggccgagctgatcaagaaggagaaggagcgccagcgcgaaggactcgagatgatcgccagtgagaacttcacctcggtggcggttctcgagagcctgagctcctgcctgaccaacaagtactccgagggatatcccggcaagaggtactacggtggcaacgagtacatcgaccgcatagagctgctcgcccagcaacgcggacgcgagctgttcaacctggacgatgagaagtggggcgttaatgtgcagccttattccggatccccggccaatctggctgtctacacgggcgtctgccggccccacgatcgcatcatgggcctggatctgcccgatggcggtcacttgacgcacggtttcttcacgcccaccaagaagatatcggccacatcgatcttcttcgagagcatgccgtacaaagtgaacccggagacgggcatcatcgattacgataagttggcggaggcggcgaagaatttccggccgcagatcatcattgctggcatatcgtgctactcccgtctgctggactatgcgcgtttccgacagatttgcgatgatgtgggcgcctacctgatggccgacatggcccatgtggcgggcattgtggccgcgggattgataccatcgccgttcgaatgggccgacattgtgaccaccaccacgcacaagacactgcgaggtccgcgcgccggcgtgatcttcttccgcaagggcgtgcgcagcaccaaggccaatggagacaaggtactctacgatctggaggagcgcatcaaccaggcggtgtttccatcactccagggtggtccgcacaacaacgccgtggctggcattgccaccgccttcaagcaggccaagagtcccgaattcaaggcctaccagacgcaggtgctcaagaatgccaaggccctgtgcgatggcctcatttcgcgaggctatcaggtggccaccggcggcaccgacgtccatttggtgctggtcgatgtgcgtaaggctggcctgaccggcgccaaggccgagtacatcctcgaggaggtgggcatcgcgtgcaacaagaacactgtgcccggcgacaagtccgccatgaatccctccggcatccggctgggcacaccggccctgaccactcgcggccttgccgagcaggacatcgagcaggtggtggccttcatcgatgctgccctaaaggttggcgtccaggcagccaagctggccggcagtcccaagataaccgattaccacaagacgctggccgagaatgtggagctcaaggcccaggtggacgagatccgcaagaatgtggcccagttcagcaggaaattcccgctgcccggcctggagaccctgtag

SEQ ID NO: 101 - protein, 537 aa, Drosophila melanogaster
MQRARSTLTQKLRFCLSRDLNTKVGNPVNFETGKLSGALTRIAAKKQPSPTPFLPAIRRYSDSKQSTLKNMADQKLLQTPLAQGDPELAELIKKEKERQREGLEMIASENFTSVAVLESLSSCLTNKYSEGYPGKRYYGGNEYIDRIELLAQQRGRELFNLDDEKWGVNVQPYSGSPANLAVYTGVCRPHDRIMGLDLPDGGHLTHGFFTPTKKISATSIFFESMPYKVNPETGIIDYDKLAEAAKNFRPQIIIAGISCYSRLLDYARFRQICDDVGAYLMADMAHVAGIVAAGLIPSPFEWADIVTTTTHKTLRGPRAGVIFFRKGVRSTKANGDKVLYDLEERINQAVFPSLQGGPHNNAVAGIATAFKQAKSPEFKAYQTQVLKNAKALCDGLISRGYQVATGGTDVHLVLVDVRKAGLTGAKAEYILEEVGIACNKNTVPGDKSAMNPSGIRLGTPALTTRGLAEQDIEQVVAFIDAALKVGVQAAKLAGSPKITDYHKTLAENVELKAQVDEIRKNVAQFSRKFPLPGLETL

SEQ ID NO: 102 - DNA, 1931 bp, Homo sapiens
ggcacgaggcctgcgacttccgagttgcgatgctgtacttctctttgttttgggcggctcggcctctgcagagatgtgggcagctggtcaggatggccattcgggctcagcacagcaacgcagcccagactcagactggggaagcaaacaggggctggacaggccaggagagcctgtcggacagtgatcctgagatgtgggagttgctgcagagggagaaggacaggcagtgtcgtggcctggagctcattgcctcagagaacttctgcagccgagctgcgctggaggccctggggtcctgtctgaacaacaagtactcggagggttatcctggcaagagatactatgggggagcagaggtggtggatgaaattgagctgctgtgccagcgccgggccttggaagcctttgacctggatcctgcacagtggggagtcaatgtccagccctactccgggtccccagccaacctggccgtctacacagcccttctgcaacctcacgaccggatcatggggctggacctgcccgatgggggccagtgatctcacccacggctacatgtctgacgtcaagcggatatcagccacgtccatcttcttcgagtctatgccctataagctcaaccccaaaactggcctcattgactacaaccagctggcactgactgctcgacttttccggccacggctcatcatagctggcaccagcgcctatgctcgcctcattgactacgcccgcatgagagaggtgtgtgatgaagtcaaagcacacctgctggcagacatggcccacatcagtggcctggtggctgccaaggtgattccctcgcctttcaagcacgcggacatcgtcaccaccactactcacaagactcttcgaggggccaggtcagggctcatcttctaccggaaaggggtgaaggctgtggaccccaagactggccgggagatcccttacacatttgaggaccgaatcaactttgccgtgttcccatccctgcaggggggcccccacaatcatgccattgctgcagtagctgtggccctaaagcaggcctgcacccccatgttccgggagtactccctgcaggttctgaagaatgctcgggccatggcagatgccctgctagagcgaggctactcactggtatcaggtggtactgacaaccacctggtgctggtggacctgcggcccaagggcctggatggagctcgggctgagcgggtgctagagcttgtatccatcactgccaacaagaacacctgtcctggagaccgaagtgccatcacaccgggcggcctgcggcttggggccccagccttaacttctcgacagttccgtgaggatgacttccggagagttgtggactttatagatgaaggggtcaacattggcttagaggtgaagagcaagactgccaagctccaggatttcaaatccttcctgcttaaggactcagaaacaagtcagcgtctggccaacctcaggcaacgggtggagcagtttgccagggccttccccatgcctggttttgatgagcattgaaggcacctgggaaatgaggcccacagactcaaagttactctccttccccctacctgggccagtgaaatagaaagcctttctattttttggtgcgggagggaagacctctcacttagggcaagagccaggtatagtctcccttcccagaatttgtaactgagaagatcttttctttttcctttttttggtaacaagacttagaaggagggcccaggcactttctgtttgaacccctgtcatgatcacagtgtcagagacgcgtcctctttcttggggaagttgaggagtgcccttcagagccagtagcaggcaggggtgggtaggcaccctccttcctgtttttatctaataaaatgctaacctgcaaaaaaaaaaaaaaaaaa

SEQ ID NO: 103 - protein, 474 aa, Homo sapiens
AAQTQTGEANRGWTGQESLSDSDPEMWELLQREKDRQCRGLELIASENFCSRAALEALGSCLNNKYSEGYPGKRYYGGAEVVDEIELLCQRRALEAFDLDPAQWGVNVQPYSGSPANLAVYTALLQPHDRIMGLDLPDGGHLTHGYMSDVKRISATSIFFESMPYKLNPKTGLIDYNQLALTARLFRPRLIIAGTSAYARLIDYARMREVCDEVKAHLLADMAHISGLVAAKVIPSPFKHADIVTTTTHKTLRGARSGLIFYRKGVKAVDPKTGREILYTFEDRINFAVFPSLQGGPHNHAIAAVAVALKQACTPMFREYSLQVLKNARAMADALLERGYSLVSGGTDNHLVLVDLRPKGLDGARAERVLELVSITANKNTCPGDRSAITPGGLRLGAPALTSRQFREDDFRRVVDFIDEGVNIGLEVKSKTAKLQDFKSFLLKDSETSQRLANLRQRVEQFARAFPMPGFDEH

SEQ ID NO: 104 - DNA, 511 bp, Drosophila melanogaster
  misc_feature 455, 463, 466, 477, 480, 481, 486, 487, 490, 493: n is a or c or g or t
  misc_feature 496, 498, 504, 507: n is a or c or g or t
gacaggagcagctcggaacggacaggaaaagcaggagactaaacagtaagcaataaattgatttggcgtatagtagcttacaccaaagtacatatattgccgcatatatagccagccggtcacttgcggatcagccaacgtcctgggccccaaggcgatagataccacgataaggagatacagcgataccaccaatcattagcaggcgacaacgacacatccgcatccgcagaagatgtccaacggcaaggcgacggtctcgttcttcgagaccgggagcaccaaacagttcgagtactgctaccagctctatccccaggttcttaagctaaaggccgagaagcgcaactgttgggaagggcgatcggtgcgggcctcttcgctattacgccagctggcgaaagggggatgtgctgcaaggcgattaagttgggtaacgccagggttttcccagncacgacgntgnaaaacgacggncanngccannctntgntgntntaaacnacncatt

SEQ ID NO: 105 - DNA, 2280 bp, Drosophila melanogaster
agatagaacgacaactcctgttcccggttcgtcgtcgttcgtcattcccatattcgcttctcgtattccctcccattcccattcgcaatcccaattcccaattcccgtcacacgagttagcagcacatcgcacagctgcatcgctccgctccgatcctttttaattttttgttgtgccttcggtggcgtgctcatttcgagaacagagtaacccctttttatttgtcagttgtcaacggcgcccctgcaggcagaaagcagaaactgaaacagcagaggaagaagaagaagcagcacagcacgggcacagcacgaagcacgcagcacagcacaagcacagaggcgaagcgaagcaaagcaaagcagaggcaacacagaaaaacagcaaagcattggagtagttgtttggatgtggacggaaaggaagactggcggcgactaactaaaagcagtacgttgacaggagcagctcggaacggacaggaaaagcaggagactaaacaccagccggtcacttgcggatcagccaacgtcctgggccccaaggcgatagataccacgataaggagatacagcgataccaccaatcattagcaggcgacaacgacacatccgcatccgcagaagatgtccaacggcaaggcgacggtctcgttcttcgagaccgggagcaccaaacagttcgagtactgctaccagctctatccccaggttcttaagctaaaggccgagaagcgctgcaagaagccgcaagagctgatccgcctggatcagtggtatcagaatgaactgcccaaattgattaaggcacgcggcaaggacgcgcatatggtatacgatgagctcgtccagtcgatgaagtggaagcagtcgcgcggcaaattctatccgcagctatcctacctggtcaaggtcaacacaccgcgcgccgtcatccaggagacaaagaaggccttccgcaagctgcccaatctggagcaggcgatcacagctttatcgaacctcaagggcgttggcaccacaatggccagtgcactgctggcagccgcagctcccgattcggcaccattcatggccgacgagtgcctgatggccataccagagatcgagggcatcgattacaccaccaaggagtacctcaacttcgtcaatcacattcaggccaccgtggagcgcctcaatgcggaggtgggcggggatacgccgcactggtcgcctcatcgcgtggagctggccctctggtcacactatgtggccaatgatctcagtcccgagatgctcgacgatatgccgccgcctggatccggcgcctccactggcaccggttcactcagcacaaacggcaacagcagcaaggtgctcgatggcgacgataccaacgatggtgtgggtgttgatttggacgacgaaagccaaggagcaggcggtcgcaacactgctacagaatcggagacagagaatgagaacaccaacccggctgctctgacgcctctacagtcgggcgaggccaagaacaacgcagctgccgttggcgccgccctgcaggacggtgactccaactttgtttcgaacgattccacctcccaggagccgatcatcgatgacaacgatggcaccacacagacaacggccaccacttccacagaggacggtgagcccatcgccctagacattggcattggcatcggttcgagtggaacaccgctcgcctcggactctgaaagcaatcaggaggcgccgcccaagaccaacagcctgcccatcctgactcccacacagcactcgagccagaatcagaatcaaaagcagtcgccgagccagccccacaaaactaacaattcgatcaccaacaacggtcagcctgctcctttggcagaagaggaagcggttacagcagcaccacagccagccagcaaagcgactgcagcaccagccaatggaaatggtaacgggaacggcgtcctgggcgacgaggatgaggatgaggcggaggacgaggaggaagatgagctggacgaggaggaggataatgaggcggagctagaggctgacgagagcaatagcagcaacggcattgtgagggacagtaaactgcagcagctggcggcgaacaaggcggtggatgcggtttcaccggtagcagcgggtgcagactcggcaccagccattggacagaagcgtactgccctgcactgcgatatggagctgaagaacgccggcggagtgggtgtgggcgtgggggagaagtcaccggatctaaagaaactgcgcagcgaatga

SEQ ID NO: 106 - protein, 550 aa, Drosophila melanogaster
MSNGKATVSFFETGSTKQFEYCYQLYPQVLKLKAEKRCKKPQELIRLDQWYQNELPKLIKARGKDAHMVYDELVQSMKWKQSRGKFYPQLSYLVKVNTPRAVIQETKKAFRKLPNLEQAITALSNLKGVGTTMASALLAAAAPDSAPFMADECLMAIPEIEGIDYTTKEYLNFVNHIQATVERLNAEVGGDTPHWSPHRVELALWSHYVANDLSPEMLDDMPPPGSGASTGTGSLSTNGNSSKVLDGDDTNDGVGVDLDDESQGAGGRNTATESETENENTNPAALTPLQSGEAKNNAAAVGAALQDGDSNFVSNDSTSQEPIIDDNDGTTQTTATTSTEDGEPIALDIGIGIGSSGTPLASDSESNQEAPPKTNSLPILTPTQHSSQNQNQKQSPSQPHKTNNSITNNGQPAPLAEEEAVTAAPQPASKATAAPANGNGNGNGVLGDEDEDEAEDEEEDELDEEEDNEAELEADESNSSNGIVRDSKLQQLAANKAVDAVSPVAAGADSAPAIGQKRTALHCDMELKNAGGVGVGVGEKSPDLKKLRSE

SEQ ID NO: 107 - DNA, 2023 bp, Drosophila melanogaster
gcctgtcagtttgactgtgtgagtgcatggcggactaaaaagaacccgacgacagcactgtaaaaattcgatttgtgtgctgtgcaaacggcggcggaagcgagcagatttttggcaaatagtgagcgattatcggattgagtaaatacaacaaacaacagagacacggccgcagcagcagcagcattaacacagtacgttgacaggagcagctcggaacggacaggaaaagcaggagactaaacaccagccggtcacttgcggatcagccaacgtcctgggccccaaggcgatagataccacgataaggagatacagcgataccaccaatcattagcaggcgacaacgacacatccgcatccgcagaagatgtccaacggcaaggcgacggtctcgttcttcgagaccgggagcaccaaacagttcgagtactgctaccagctctatccccaggttcttaagctaaaggccgagaagcgctgcaagaagccgcaagagctgatccgcctggatcagtggtatcagaatgaactgcccaaattgattaaggcacgcggcaaggacgcgcatatggtatacgatgagctcgtccagtcgatgaagtggaagcagtcgcgcggcaaattctatccgcagctatcctacctggtcaaggtcaacacaccgcgcgccgtcatccaggagacaaagaaggccttccgcaagctgcccaatctggagcaggcgatcacagctttatcgaacctcaagggcgttggcaccacaatggccagtgcactgctggcagccgcagctcccgattcggcaccattcatggccgacgagtgcctgatggccataccagagatcgagggcatcgattacaccaccaaggagtacctcaacttcgtcaatcacattcaggccaccgtggagcgcctcaatgcggaggtgggcggggatacgccgcactggtcgcctcatcgcgtggagctggccctctggtcacactatgtggccaatgatctcagtcccgagatgctcgacgatatgccgccgcctggatccggcgcctccactggcaccggttcactcagcacaaacggcaacagcagcaaggtgctcgatggcgacgataccaacgatggtgtgggtgttgatttggacgacgaaagccaaggagcaggcggtcgcaacactgctacagaatcggagacagagaatgagaacaccaacccggctgctctgacgcctctacagtcgggcgaggccaagaacaacgcagctgccgttggcgccgccctgcaggacggtgactccaactttgtttcgaacgattccacctcccaggagccgatcatcgatgacaacgatggcaccacacagacaacggccaccacttccacagaggacggtgagcccatcgccctagacattggcattggcatcggttcgagtggaacaccgctcgcctcggactctgaaagcaatcaggaggcgccgcccaagaccaacagcctgcccatcctgactcccacacagcactcgagccagaatcagaatcaaaagcagtcgccgagccagccccacaaaactaacaattcgatcaccaacaacggtcagcctgctcctttggcagaagaggaagcggttacagcagcaccacagccagccagcaaagcgactgcagcaccagccaatggaaatggtaacgggaacggcgtcctgggcgacgaggatgaggatgaggcggaggacgaggaggaagatgagctggacgaggaggaggataatgaggcggagctagaggctgacgagagcaatagcagcaacggcattgtgagggacagtaaactgcagcagctggcggcgaacaaggcggtggatgcggtttcaccggtagcagcgggtgcagactcggcaccagccattggacagaagcgtactgccctgcactgcgatatggagctgaagaacgccggcggagtgggtgtgggcgtgggggagaagtcaccggatctaaagaaactgcgcagcgaatga

SEQ ID NO: 108 - protein, 550 aa, Drosophila melanogaster; identical to SEQ ID NO: 106

SEQ ID NO: 109 - DNA, 740 bp, Drosophila melanogaster
  misc_feature 3, 8, 11, 40, 41, 48, 49, 66, 70, 76, 78, 81, 96, 100: n is a or g or c or t
  misc_feature 106, 114, 120, 121, 124, 154, 176, 178, 179, 185: n is a or g or c or t
  misc_feature 186, 192, 197, 215, 218, 235..237, 251, 256, 268: n is a or g or c or t
  misc_feature 287, 294, 307, 309, 310, 313, 314, 320, 321, 329: n is a or g or c or t
  misc_feature 333..335, 337, 339, 344, 346, 350, 359, 369, 370, 372: n is a or g or c or t
  misc_feature 374, 375, 382, 422, 442..445, 453, 461..464, 473, 475..481: n is a or g or c or t
  misc_feature 486, 491, 492, 494, 506, 518, 540, 545, 568, 569, 574: n is a or g or c or t
  misc_feature 575, 597, 609, 610, 618, 623, 629, 632, 640, 644, 645: n is a or g or c or t
  misc_feature 650, 660, 663, 664, 667, 682, 687, 688, 693..695: n is a or g or c or t
  misc_feature 703, 704, 719, 725, 727, 733, 734: n is a or g or c or t
ctncatgntgnaggagacaaggcgttctatattatatagnngattttnntgtatataaaggaaganctgngctaangnaanaggcatctcgatgantttnataatnagggcaantggtannaanggtttatgccaaagtattacacaccagggntgggcacaacagatcttaactnannataggnnattggnataancttaaatttgtaagattntgnaataatatagtagagannntcaatacgcattantaatngtgacgatcccnagcataaactcaaaaaaancttatanttttataaaggcnannccnnactaannaattaaangaannncngncgccncnaaangatgattgngctatataannanannattgatngaggcacttatattattataattaaaacacttaattattntgtgtgaaatgattgcactnnnnattgggcnagagcctnnnncgtattganannnnnnnatttnggctnnanctgtaaatatcntacaaactcgtnattgctaaataacttttgtatnccccnctggtcactctgacttaaacgtnnttcgnnaaaacagcggctgatcactgangttttctcccgnntttcgctntcaanccgaantanaaacaggngaanntcccngataatttgnggnntancccactgatcacagngcccnnggatnnncaaggaanngcgatcgaaacccgncctggngnaacacnntttccc

SEQ ID NO: 110 - DNA, 664 bp, Drosophila melanogaster
caaaaacagcggctgatcactgaagttttctcgtgtttttcgctatcaaaccgaaataaaaacagcccaaaatgtccttcgttaagaacgcccgtttgctggccgcccgcggcgctcgcttggcccagaaccgcagctactcggatgagatgaagctgaccttcgccgccgccaacaaaaccttctacgatgccgctgtggtgcgccaaatcgatgtgccttccttctcgggatccttcggcatcctggccaagcacgtgcccactctggctgtcctgaagcccggcgttgtccaggtggtggaaaacgatggcaagaccctcaagttcttcgtctccagcggttccgtcaccgtcaacgaggattcctccgttcaggttctggccgaggaggcccacaacatcgaggacatcgatgccaatgaggcgcgccagctgctcgcgaaataccagtcacagcttagctccgctggcgacgacaaggccaaggcccaggctgccattgccgtggaggtcgccgaagcgttagtcaaggctgccgaatagacgtaatcaccacacaaccgccaccaataaaccacaatcgatgctttgtgtctgaaataaataaaaaacataacgatcaccttaaaaagccagagagttatgaaacaataaaaaagcga

SEQ ID NO: 111 - protein, 157 aa, Drosophila melanogaster
MSFVKNARLLAARGARLAQNRSYSDEMKLTFAAANKTFYDAAVVRQIDVPSFSGSFGILAKHVPTLAVLKPGVVQVVENDGKTLKFFVSSGSVTVNEDSSVQVLAEEAHNIEDIDANEARQLLAKYQSQLSSAGDDKAKAQAAIAVEVAEALVKAAE

SEQ ID NO: 112 - DNA, 994 bp, Homo sapiens
gtcctcctcgccctccaggccgcccgcgccgcgccggagtccgctgtccgccagctacccgcttcctgccgcccgccgctgccatgctgcccgccgcgctgctccgccgcccgggacttggccgcctcgtccgccacgcccgtgcctatgccgaggccgccgccgccccggctgccgcctctggccccaaccagatgtccttcaccttcgcctctcccacgcaggtgttcttcaacggtgccaacgtccggcaggtggacgtgcccacgctgaccggagccttcggcatcctggcggcccacgtgcccacgctgcaggtcctgcggccggggctggtcgtggtgcatgcagaggacggcaccacctccaaatactttgtgagcagcggttccatcgcagtgaacgccgactcttcggtgcagttgttggccgaagaggccgtgacgctggacatgttggacctgggggcagccaaggcaaacttggagaaggcccaggcggagctggtggggacagctgacgaggccacgcgggcagagatccagatccgaatcgaggccaacgaggccctggtgaaggccctggagtaggcggtgcgtacccggtgtcccgaggcccggccaggggctgggcagggatgccaggtgggcccagccagctcctggggtcccggccacctggggaagccgcgcctgccaaggaggccaccagagggcagtgcaggcttctgcctgggccccaggccctgcctgtgttgaaagctctggggactgggccagggaagctcctcctcagctttgagctgtggctgccacccatggggctctccttccgcctctcaagatccccccagcctgacgggccgcttaccatcccctctgccctgcagagccagccgccaaggttgacctcagcttcggagccacctctggatgaactgcccccagcccccgccccattaaagacccggaagcctgaaaaaaaaaaaaaaaaa

SEQ ID NO: 113 - protein, 168 aa, Homo sapiens
MLPAALLRRPGLGRLVRHARAYAEAAAAPAAASGPNQMSFTFASPTQVFFNGANVRQVDVPTLTGAFGILAAHVPTLQVLRPGLVVVHAEDGTTSKYFVSSGSIAVNADSSVQLLAEEAVTLDMLDLGAAKANLEKAQAELVGTADEATRAEIQIRIEANEALVKALE

SEQ ID NO: 114 - DNA, 4010 bp, Drosophila melanogaster
agtttcattcggggatgcttggcctatcgcaaggaggatcgcatggatgtgttcgcactggccaggcacgagtacattcagccaccgataccgaaacatgggcgcggttcgctcaatcagcaacagcaggcgcaacaacagcagcagcaacaacagcaacagcagcagcaacagtcgtcgacgtcacaggccaattctacaggccagacatctttctctgcccacatgtttggcaatatgaatcagtcgagttcgtcctagatgagagcgactgcaaaaaaatcggaataaacacggttataatatataagtacaaataaaccatatatatgtgtttatgttatgtatatatacataaaggaaaataacaaggcaaatgtgaaaattagtgcaaactgaacgaaaagacaaaaataaaacaaaaggaaacccaaatgtgataatattgtaatataatgtgaaaagcaaaacacacacaaatacacaactcacgcacttagccacgtatgtgtgtgcagaaaaatatgcggcgcttaaaaaagatgtcccccggcgcccatttgcagatgtccccgcagaacacttcgtccctaagtcaacaccatccacatcaacagcaacagttacaacccccacagcagcaacaacagcatttccctaaccatcacagcgcccagcaacagtcgcagcagcagcagcaacaggagcaacagaatccccagcagcaggcgcaacagcagcagcagatactcccacatcaacatttgcagcacctgcacaagcatccgcatcagctgcaactgcatcagcagcagcaacaacaactccaccagcaacagcagcaacacttccaccagcagtcgctgcaagggctgcatcagggtagcagcaatccggattcgaatatgagcactggctcctcgcatagcgagaaggatgtcaatgatatgctgagtggcggtgcagcaacgccaggagctgcagcagcagcgattcaacagcaacatcccgcctttgcgcccacactgggaatgcagcaaccaccgccgcccccacctcaacactccaataatggaggcgagatgggctacttgtcggcaggcacgaccacgacgacgtcggtgttaacggtaggcaagcctcggacgccagcggagcggaaacggaagcgaaaaatgcctccatgtgccactagtgcggatgaggcggggagtggcggtggctctggcggagcaggagcaaccgttgttaacaacagcagcctgaagggcaaatcattggcctttcgtgatatgcccaaggtaaacatgagcctgaatctgggcgatcgtctgggaggatctgcaggaagcggagtaggagccggtggcgccggaagcgggggaggtggcgctggttccggttctggaagcggtggcggcaaaagcgcccgcctgatgctgccagtcagcgacaacaagaagatcaacgactatttcaataagcagcaaacgggcgtgggcgtcggtgtgccaggtggtgcgggaggcaataccgctggccttcgaggatcacatacgggaggtggcagcaagtcaccctcatccgcccagcagcagcaaacggcggcacagcagcagggaagcggtgttgcgacgggaggcagtgcaggcggttccgctggcaaccaggtgcaagtgcaaacgagcagcgcttacgccctttacccaccagctagtccccaaacccagacgtcacagcaacagcagcagcagcaaccgggatcagactttcactatgtcaactccagcaaggcgcagcaacaacagcagcgtcaacagcaacagacttccaatcaaatggttcctccacacgtggtcgttggccttggtggtcatccactgagcctcgcgtccattcagcagcagacgcccttatcccagcagcaacagcagcaacaacagcagcagcaacagcagcaactgggaccaccgaccacatcgacggcctccgtcgtgccaacgcatccgcatcaactcggatccctgggagttgttgggatggtcggtgtgggtgttggcgtgggcgttggagtaaatgtgggtgtgggaccaccactgccaccaccaccgccgatggccatgccagcggccattatcacttatagtaaggccactcaaacggaggtgtcgctgcatgaattgcaggagcgcgaagcggagcacgaatcgggcaaggtgaagctagacgagatgacacggctgtccgatgaacaaaagtcccaaattgttggcaaccagaagacgattgaccagcacaagtgccacatagccaagtgtattgatgtggtcaagaagctgttgaaggagaagagcagcatcgagaagaaggaggcgcgacagaagtgcatgcagaatcgcctcaggctcggacagtttgttacccaacgagtgggcgccacattccaggagaactggacggacggctatgcgttccaggagctgagtcggcggcaagaagaaataaccgctgagcgtgaagagatagatcggcagaaaaagcagctgatgaaaaagcgtccggcggagtccggacgcaagcgcaacaacaacagtaaccagaacaaccagcagcagcagcaacagcaacaccagcaacagcagcagcaacaaaattccaactcgaacgattccacgcagctgacgagcggagttgttaccggtccaggcagtgatcgtgtgagcgtaagcgtcgacagcggattgggtggcaataatgcgggcgcgatcggtggcggaaccgttggtggtggcgttggaggtggtggtgttggaggcggtggtgtcggaggcggcggtggacgtggactttctcgcagcaattcgacgcaggccaatcaggctcaattgctgcacaacggcggtggtggttcgggcggcaatgtcggcaactcgggcggcgttggcgaccgcttgtcagatcgaggaggaggaggtggcggcatcggcggaaacgatagcggcagctgctcggactcgggcactttcctgaagccagaccccgtatcgggtgcctacacagcgcaggagtattacgagtacgatgagatcctcaagttgcgacaaaatgccctcaaaaaggaggacgccgacctgcagctggagatggagaagctggagcgggagcgcaatctgcacatccgagagctcaagcggattcttaacgaggatcagtcccgctttaacaatcatcccgtgctgaatgatcgctatcttctgttgatgctcctgggcaagggcggcttctcagaggtccacaaggccttcgacctgaaggagcaacgctatgtcgcatgtaaggtgcaccaattaaacaaggattggaaggaggataagaaagctaattatatcaaacacgctttgcgggaatacaacattcacaaggcactggatcatccgcgggtcgtcaagctatacgatgtcttcgagatcgatgcgaattccttttgcacagtgctcgaatactgtgatggccacgatctggacttctatttgaagcaacataagactatacccgagcgtgaagcgcgctcgataataatgcaggttgtatctgcactcaagtatctaaatgagattaagcctccagttatccactacgatctgaagcccggcaacattctgcttaccgagggcaacgtctgcggcgagattaagatcaccgacttcggtctgtcaaaggtgatggacgacgagaattacaatcccgatcacggcatggatctgacctctcagggggcgggaacctactggtatctgccacccgagtgctttgtcgtgggcaaaaatccgccgaaaatctcctccaaagtggacgtatggagtgtgggtgttatcttctaccagtgtctgtacggcaaaaagcccttcggtcacaatcagtcgcaggccacgattctcgaggagaatacgatcctgaaggccaccgaagtgcagttctccaacaagccaaccgtttctaacgaggccaag

SEQ ID NO: 115 - protein, 1168 aa, Drosophila melanogaster
MCVQKNMRRLKKMSPGAHLQMSPQNTSSLSQHHPHQQQQLQPPQQQQQHFPNHHSAQQQSQQQQQQEQQNPQQQAQQQQQILPHQHLQHLHKHPHQLQLHQQQQQQLHQQQQQHFHQQSLQGLHQGSSNPDSNMSTGSSHSEKDVNDMLSGGAATPGAAAAAIQQQHPAFAPTLGMQQPPPPPPQHSNNGGEMGYLSAGTTTTTSVLTVGKPRTPAERKRKRKMPPCATSADEAGSGGGSGGAGATVVNNSSLKGKSLAFRDMPKVNMSLNLGDRLGGSAGSGVGAGGAGSGGGGAGSGSGSGGGKSARLMLPVSDNKKINDYFNKQQTGVGVGVPGGAGGNTAGLRGSHTGGGSKSPSSAQQQQTAAQQQGSGVATGGSAGGSAGNQVQVQTSSAYALYPPASPQTQTSQQQQQQQPGSDFHYVNSSKAQQQQQRQQQQTSNQMVPPHVVVGLGGHPLSLASIQQQTPLSQQQQQQQQQQQQQQLGPPTTSTASVVPTHPHQLGSLGVVGMVGVGVGVGVGVNVGVGPPLPPPPPMAMPAAIITYSKATQTEVSLHELQEREAEHESGKVKLDEMTRLSDEQKSQIVGNQKTIDQHKCHIAKCIDVVKKLLKEKSSIEKKEARQKCMQNRLRLGQFVTQRVGATFQENWTDGYAFQELSRRQEEITAEREEIDRQKKQLMKKRPAESGRKRNNNSNQNNQQQQQQQHQQQQQQQNSNSNDSTQLTSGVVTGPGSDRVSVSVDSGLGGNNAGAIGGGTVGGGVGGGGVGGGGVGGGGGRGLSRSNSTQANQAQLLHNGGGGSGGNVGNSGGVGDRLSDRGGGGGGIGGNDSGSCSDSGTFLKPDPVSGAYTAQEYYEYDEILKLRQNALKKEDADLQLEMEKLERERNLHIRELKRILNEDQSRFNNHPVLNDRYLLLMLLGKGGFSEVHKAFDLKEQRYVACKVHQLNKDWKEDKKANYIKHALREYNIHKALDHPRVVKLYDVFEIDANSFCTVLEYCDGHDLDFYLKQHKTIPEREARSIIMQVVSALKYLNEIKPPVIHYDLKPGNILLTEGNVCGEIKITDFGLSKVMDDENYNPDHGMDLTSQGAGTYWYLPPECFVVGKNPPKISSKVDVWSVGVIFYQCLYGKKPFGHNQSQATILEENTILKATEVQFSNKPTVSNEAK

SEQ ID NO: 116 - DNA, 4108 bp, Drosophila melanogaster
agtttcattcggggatgcttggcctatcgcaaggaggatcgcatggatgtgttcgcactggccaggcacgagtacattcagccaccgataccgaaacatgggcgcggttcgctcaatcagcaacagcaggcgcaacaacagcagcagcaacaacagcaacagcagcagcaacagtcgtcgacgtcacaggccaattctacaggccagacatctttctctgcccacatgtttggcaatatgaatcagtcgagttcgtcctagtggtgtcggtgtcgttttggttttgtcggcggttgctaaacacaatttaagttcactcggttagcagacattacacactgcctgctctcatacatatttacgcacttgtatatacatgcaatgtgcctgtgtgtgcgcaagaaaccagaaaaaacgaaaagtacaacattcgttgagtcgcgttcggcttaatttttttttgtgttaccgtgtgtgtgtttgtgctttggatttgccaattttagccgactggctctcagtgtcgaacttaaacttaaagagcgagcaacgtgacgtgtcgcccagtgtcgcttaaaattcgcgcacacaacttcctactacaaaaaaacgaaagaaagaaggagaaaaaacgttaaagatgtcccccggcgcccatttgcagatgtccccgcagaacacttcgtccctaagtcaacaccatccacatcaacagcaacagttacaacccccacagcagcaacaacagcatttccctaaccatcacagcgcccagcaacagtcgcagcagcagcagcaacaggagcaacagaatccccagcagcaggcgcaacagcagcagcagatactcccacatcaacatttgcagcacctgcacaagcatccgcatcagctgcaactgcatcagcagcagcaacaacaactccaccagcaacagcagcaacacttccaccagcagtcgctgcaagggctgcatcagggtagcagcaatccggattcgaatatgagcactggctcctcgcatagcgagaaggatgtcaatgatatgctgagtggcggtgcagcaacgccaggagctgcagcagcagcgattcaacagcaacatcccgcctttgcgcccacactgggaatgcagcaaccaccgccgcccccacctcaacactccaataatggaggcgagatgggctacttgtcggcaggcacgaccacgacgacgtcggtgttaacggtaggcaagcctcggacgccagcggagcggaaacggaagcgaaaaatgcctccatgtgccactagtgcggatgaggcggggagtggcggtggctctggcggagcaggagcaaccgttgttaacaacagcagcctgaagggcaaatcattggcctttcgtgatatgcccaaggtaaacatgagcctgaatctgggcgatcgtctgggaggatctgcaggaagcggagtaggagccggtggcgccggaagcgggggaggtggcgctggttccggttctggaagcggtggcggcaaaagcgcccgcctgatgctgccagtcagcgacaacaagaagatcaacgactatttcaataagcagcaaacgggcgtgggcgtcggtgtgccaggtggtgcgggaggcaataccgctggccttcgaggatcacatacgggaggtggcagcaagtcaccctcatccgcccagcagcagcaaacggcggcacagcagcagggaagcggtgttgcgacgggaggcagtgcaggcggttccgctggcaaccaggtgcaagtgcaaacgagcagcgcttacgccctttacccaccagctagtccccaaacccagacgtcacagcaacagcagcagcagcaaccgggatcagactttcactatgtcaactccagcaaggcgcagcaacaacagcagcgtcaacagcaacagacttccaatcaaatggttcctccacacgtggtcgttggccttggtggtcatccactgagcctcgcgtccattcagcagcagacgcccttatcccagcagcaacagcagcaacaacagcagcagcaacagcagcaactgggaccaccgaccacatcgacggcctccgtcgtgccaacgcatccgcatcaactcggatccctgggagttgttgggatggtcggtgtgggtgttggcgtgggcgttggagtaaatgtgggtgtgggaccaccactgccaccaccaccgccgatggccatgccagcggccattatcacttatagtaaggccactcaaacggaggtgtcgctgcatgaattgcaggagcgcgaagcggagcacgaatcgggcaaggtgaagctagacgagatgacacggctgtccgatgaacaaaagtcccaaattgttggcaaccagaagacgattgaccagcacaagtgccacatagccaagtgtattgatgtggtcaagaagctgttgaaggagaagagcagcatcgagaagaaggaggcgcgacagaagtgcatgcagaatcgcctcaggctcggacagtttgttacccaacgagtgggcgccacattccaggagaactggacggacggctatgcgttccaggagctgagtcggcggcaagaagaaataaccgctgagcgtgaagagatagatcggcagaaaaagcagctgatgaaaaagcgtccggcggagtccggacgcaagcgcaacaacaacagtaaccagaacaaccagcagcagcagcaacagcaacaccagcaacagcagcagcaacaaaattccaactcgaacgattccacgcagctgacgagcggagttgttaccggtccaggcagtgatcgtgtgagcgtaagcgtcgacagcggattgggtggcaataatgcgggcgcgatcggtggcggaaccgttggtggtggcgttggaggtggtggtgttggaggcggtggtgtcggaggcggcggtggacgtggactttctcgcagcaattcgacgcaggccaatcaggctcaattgctgcacaacggcggtggtggttcgggcggcaatgtcggcaactcgggcggcgttggcgaccgcttgtcagatcgaggaggaggaggtggcggcatcggcggaaacgatagcggcagctgctcggactcgggcactttcctgaagccagaccccgtatcgggtgcctacacagcgcaggagtattacgagtacgatgagatcctcaagttgcgacaaaatgccctcaaaaaggaggacgccgacctgcagctggagatggagaagctggagcgggagcgcaatctgcacatccgagagctcaagcggattcttaacgaggatcagtcccgctttaacaatcatcccgtgctgaatgatcgctatcttctgttgatgctcctgggcaagggcggcttctcagaggtccacaaggccttcgacctgaaggagcaacgctatgtcgcatgtaaggtgcaccaattaaacaaggattggaaggaggataagaaagctaattatatcaaacacgctttgcgggaatacaacattcacaaggcactggatcatccgcgggtcgtcaagctatacgatgtcttcgagatcgatgcgaattccttttgcacagtgctcgaatactgtgatggccacgatctggacttctatttgaagcaacataagactatacccgagcgtgaagcgcgctcgataataatgcaggttgtatctgcactcaagtatctaaatgagattaagcctccagttatccactacgatctgaagcccggcaacattctgcttaccgagggcaacgtctgcggcgagattaagatcaccgacttcggtctgtcaaaggtgatggacgacgagaattacaatcccgatcacggcatggatctgacctctcagggggcgggaacctactggtatctgccacccgagtgctttgtcgtgggcaaaaatccgccgaaaatctcctccaaagtggacgtatggagtgtgggtgttatcttctaccagtgtctgtacggcaaaaagcccttcggtcacaatcagtcgcaggccacgattctcgaggagaatacgatcctgaaggccaccgaagtgcagttctccaacaagccaaccgtttctaacgaggccaag

SEQ ID NO: 117 - protein, 1156 aa, Drosophila melanogaster
MSPGAHLQMSPQNTSSLSQHHPHQQQQLQPPQQQQQHFPNHHSAQQQSQQQQQQEQQNPQQQAQQQQQILPHQHLQHLHKHPHQLQLHQQQQQQLHQQQQQHFHQQSLQGLHQGSSNPDSNMSTGSSHSEKDVNDMLSGGAATPGAAAAAIQQQHPAFAPTLGMQQPPPPPPQHSNNGGEMGYLSAGTTTTTSVLTVGKPRTPAERKRKRKMPPCATSADEAGSGGGSGGAGATVVNNSSLKGKSLAFRDMPKVNMSLNLGDRLGGSAGSGVGAGGAGSGGGGAGSGSGSGGGKSARLMLPVSDNKKINDYFNKQQTGVGVGVPGGAGGNTAGLRGSHTGGGSKSPSSAQQQQTAAQQQGSGVATGGSAGGSAGNQVQVQTSSAYALYPPASPQTQTSQQQQQQQPGSDFHYVNSSKAQQQQQRQQQQTSNQMVPPHVVVGLGGHPLSLASIQQQTPLSQQQQQQQQQQQQQQLGPPTTSTASVVPTHPHQLGSLGVVGMVGVGVGVGVGVNVGVGPPLPPPPPMAMPAAIITYSKATQTEVSLHELQEREAEHESGKVKLDEMTRLSDEQKSQIVGNQKTIDQHKCHIAKCIDVVKKLLKEKSSIEKKEARQKCMQNRLRLGQFVTQRVGATFQENWTDGYAFQELSRRQEEITAEREEIDRQKKQLMKKRPAESGRKRNNNSNQNNQQQQQQQHQQQQQQQNSNSNDSTQLTSGVVTGPGSDRVSVSVDSGLGGNNAGAIGGGTVGGGVGGGGVGGGGVGGGGGRGLSRSNSTQANQAQLLHNGGGGSGGNVGNSGGVGDRLSDRGGGGGGIGGNDSGSCSDSGTFLKPDPVSGAYTAQEYYEYDEILKLRQNALKKEDADLQLEMEKLERERNLHIRELKRILNEDQSRFNNHPVLNDRYLLLMLLGKGGFSEVHKAFDLKEQRYVACKVHQLNKDWKEDKKANYIKHALREYNIHKALDHPRVVKLYDVFEIDANSFCTVLEYCDGHDLDFYLKQHKTIPEREARSIIMQVVSALKYLNEIKPPVIHYDLKPGNILLTEGNVCGEIKITDFGLSKVMDDENYNPDHGMDLTSQGAGTYWYLPPECFVVGKNPPKISSKVDVWSVGVIFYQCLYGKKPFGHNQSQATILEENTILKATEVQFSNKPTVSNEAK

SEQ ID NO: 118 - DNA, 3327 bp, Homo sapiens
ccgggcggggggttgcggcgctcaggagaggccccggctccgccccgggcctgcccagggggagagcggagctccgcagccgggtcgggtcggggcccctcccgggaggagcgtggagcgcggcggcggcggcggcagcagaaatgatggaagaattgcatagcctggacccacgacggcaggaattattggaggccaggtttactggagtaggtgttagtaagggaccacttaatagtgagtcttccaaccagagcttgtgcagcgtcggatccttgagtgataaagaagtagagactcccgagaaaaagcagaatgaccagcgaaatcggaaaagaaaagctgaaccatatgaaactagccaagggaaaggcactcctaggggacataaaattagtgattactttgagtttgctgggggaagcgcgccaggaaccagccctggcagaagtgttccaccagttgcacgatcctcaccgcaacattccttatccaatcccttaccgcgacgagtagaacagcccctctatggtttagatggcagtgctgcaaaggaggcaacggaggagcagtctgctctgccaaccctcatgtcagtgatgctagcaaaacctcggcttgacacagagcagctggcgcaaaggggagctggcctctgcttcacttttgtttcagctcagcaaaacagtccctcatctacgggatctggcaacacagagcattcctgcagctcccaaaaacagatctccatccagcacagacggacccagtccgacctcacaatagaaaaaatatctgcactagaaaacagtaagaattctgacttagagaagaaggagggaagaatagatgatttattaagagccaactgtgatttgagacggcagattgatgaacagcaaaagatgctagagaaatacaaggaacgattaaatagatgtgtgacaatgagcaagaaactccttatagaaaagtcaaaacaagagaagatggcgtgtagagataagagcatgcaagaccgcttgagactgggccactttactactgtccgacacggagcctcatttactgaacagtggacagatggttatgcttttcagaatcttatcaagcaacaggaaaggataaattcacagagggaagagatagaaagacaacggaaaatgttagcaaagcggaaacctcctgccatgggtcaggcccctcctgcaaccaatgagcagaaacagcggaaaagcaagaccaatggagctgaaaatgaaacgttaacgttagcagaataccatgaacaagaagaaatcttcaaactcagattaggtcatcttaaaaaggaggaagcagagatccaggcagagctggagagactagaaagggttagaaatctacatatcagggaactaaaaaggatacataatgaagataattcacaatttaaagatcatccaacgctaaatgacagatatttgttgttacatcttttgggtagaggaggtttcagtgaagtttacaaggcatttgatctaacagagcaaagatacgtagctgtgaaaattcaccagttaaataaaaactggagagatgagaaaaaggagaattaccacaagcatgcatgtagggaataccggattcataaagagctggatcatcccagaatagttaagctgtatgattacttttcactggatactgactcgttttgtacagtattagaatactgtgagggaaatgatctggacttctacctgaaacagcacaaattaatgtcggagaaagaggcccggtccattatcatgcagattgtgaatgctttaaagtacttaaatgaaataaaacctcccatcatacactatgacctcaaaccaggtaatattcttttagtaaatggtacagcgtgtggagagataaaaattacagattttggtctttcgaagatcatggatgatgatagctacaattcagtggatggcatggagctaacatcacaaggtgctggtacttattggtatttaccaccagagtgttttgtggttgggaaagaaccaccaaagatctcaaataaagttgatgtgtggtcggtgggtgtgatcttctatcagtgtctttatggaaggaagccttttggccataaccagtctcagcaagacatcctacaagagaatacgattcttaaagctactgaagtgcagttcccgccaaagccagtagtaacacctgaagcaaaggcgtttattcgacgatgcttggcctaccgaaagagggaccgcattgatgtccagcagctggcctgtgatccctacttgttgcctcacatccgaaagtcagtctctacaagtagccctgctggagctgctattgcatcaacctctggggcgtccaataacagttcttctaattgagactgactccaaggccacaaactgttcaacacacacaaagtggacaaatggcgttcagcagcgggtttggaacatagcgaatccgaatggatctgatgaaacctgtaccaggtgcttttattttcttgcttttttcccatccatagagcatgacagcatcgattctcattgaggagaaaccttgggcagctccggccaggccttgtaggaaaaggccccgcccgaggttccagcgtcaacggccactgtgtgtggctgctctgagtgaggaaaaaattaaaaagaaaaactggttccatgtactgtgaacttgaaaacttgcagactcaggggggtccctgatgcagtgcttcagatgaagaatgtggacttgaaaatacagactgggctagtccagtgtctatatttaaacttgttcttttcttttaataaagtttaggtaacatctcctgaaaagcttgtagcacaaaggctcagctggggatggtgtttgacttcggaggaaaaaagttgctattgcccgttaaaggcactagagttagtgttttatccctaaataatttcaatttttaaaaacatgcagcttccctctccccttttttatttttgaaagaatacatttggtcataaagtgaaacccgtattagcaagtacgaggcaatgttcattccaatcagatgcagctttctcctccgtctggtctcctgtttgcaattgcttccctcatctcagtagggaaaaaattgagtgggagtactgagatgtgtgggtttttgccattggacaaagaatgaggttagaagactgcagcttggagtctctctaggttttcaactatttcttcacaatttgaacacttgacggttgtcccttttaatttatttgaagtgctatttttttaaataaaggttcatctgtccatgcaaaaaaa

SEQ ID NO: 119 - protein, 749 aa, Homo sapiens
MEELHSLDPRRQELLEARFTGVGVSKGPLNSESSNQSLCSVGSLSDKEVETPEKKQNDQRNRKRKAEPYETSQGKGTPRGHKISDYFEFAGGSAPGTSPGRSVPPVARSSPQHSLSNPLPRRVEQPLYGLDGSAAKEATEEQSALPTLMSVMLAKPRLDTEQLAQRGAGLCFTFVSAQQNSPSSTGSGNTEHSCSSQKQISIQHRRTQSDLTIEKISALENSKNSDLEKKEGRIDDLLRANCDLRRQIDEQQKMLEKYKERLNRCVTMSKKLLIEKSKQEKMACRDKSMQDRLRLGHFTTVRHGASFTEQWTDGYAFQNLIKQQERINSQREEIERQRKMLAKRKPPAMGQAPPATNEQKQRKSKTNGAENETLTLAEYHEQEEIFKLRLGHLKKEEAEIQAELERLERVRNLHIRELKRIHNEDNSQFKDHPTLNDRYLLLHLLGRGGFSEVYKAFDLTEQRYVAVKIHQLNKNWRDEKKENYHKHACREYRIHKELDHPRIVKLYDYFSLDTDSFCTVLEYCEGNDLDFYLKQHKLMSEKEARSIIMQIVNALKYLNEIKPPIIHYDLKPGNILLVNGTACGEIKITDFGLSKIMDDDSYNSVDGMELTSQGAGTYWYLPPECFVVGKEPPKISNKVDVWSVGVIFYQCLYGRKPFGHNQSQQDILQENTILKATEVQFPPKPVVTPEAKAFIRRCLAYRKRDRIDVQQLACDPYLLPHIRKSVSTSSPAGAAIASTSGASNNSSSN

SEQ ID NO: 120 - DNA, 1509 bp, Drosophila melanogaster
atctgtaagtgaagtccactaacaaccggtttacttgcagtgcgcagctgccgaacgggcaaacaggtccagatgacggaggcggaggtgcgtggcctctgtctcaagtcgcgcgagatcttcttgcaacagcccatcctgctggaactggaggcaccgctgatcatctgcggcgacatccacggccagtacacagacctgttgcgcctgttcgagtacggcggattccctccggctgccaactacttgttcctcggcgactacgtcgatcggggcaagcagtccctggagaccatctgtctgctgctggcctacaagatcaaatatccggagaacttcttcttgttgcgcggcaaccacgagtgcgccagtattaataggatttacggcttctacgatgagtgcaagcgccgatacaatgtcaaactgtggaagactttcacagattgcttcaactgtctgccggtagccgccattattgacgaaaagatcttctgctgccacggcggcctcagtcccgatcttcagggcatggagcagatccgtcgcctaatgcgacccacagatgtgccggataccgggttactgtgcgatcttctgtggagtgatcccgacaaggatgttcagggttggggcgagaatgatcgcggtgtgagcttcaccttcggtgtggatgtggtctccaagtttttgaaccgccacgagctggacttgatctgccgtgcacatcaggttgtggaggatggctatgagttctttgcgcgtcggcaactggtcacgttgttctcggcgcccaattactgtggagagttcgacaatgccggcggaatgatgaccgtggacgacacgctgatgtgctcattccagatcctgaaaccatccgagaagaaggccaagtatctgtacagcggaatgaactcgtcgcgacccacaacaccgcagcgcagcgccccaatgcttgcgaccaacaagaagaaataatatatccatccgcttccatttccttaaaggttcaacaaacaacagaaataaacttttacatagatacacacatatatacatataaatataacgaaacgatagaaaaggagagcgttaggcgatagtagagaaagggcaaatgataaattaaatgtgtgagctattaaagcaagcaaaatcgaagtgcatgaatatcaacatctatgtgaatccgtcattatctgttatctgatgtgtcatctgtatccaacttgattaccttatccgtgtacctgctagttgcagcagcaacatcaggagcaacaacaccagcagcagcagcagcagaaacatcagtgaaacactcagaggcccatagttaagtcgattcctgcatttgatgattatctgttgaatggaaattgtgacaacgtccccgtaacagcagctcccagatccaaaactcccgaaacatgcagataaataaatacattaaaagtacagcgatgttaagcaatgaatttatatataggcttattaatgtaaact

SEQ ID NO: 121 - protein, 302 aa, Drosophila melanogaster
MTEAEVRGLCLKSREIFLQQPILLELEAPLIICGDIHGQYTDLLRLFEYGGFPPAANYLFLGDYVDRGKQSLETICLLLAYKIKYPENFFLLRGNHECASINRIYGFYDECKRRYNVKLWKTFTDCFNCLPVAAIIDEKIFCCHGGLSPDLQGMEQIRRLMRPTDVPDTGLLCDLLWSDPDKDVQGWGENDRGVSFTFGVDVVSKFLNRHELDLICRAHQVVEDGYEFFARRQLVTLFSAPNYCGEFDNAGGMMTVDDTLMCSFQILKPSEKKAKYLYSGMNSSRPTTPQRSAPMLATNKKK

SEQ ID NO: 122 - DNA, 3590 bp, Homo sapiens
cctgggtctgacgcggccctgttcgagggggcctctcttgtttatttatttattttccgtgggtgcctccgagtgtgcgcgcgctctcgctacccggcggggagggggtggggggagggcccgggaaaagggggagttggagccggggtcgaaacgccgcgtgacttgtaggtgagagaacgccgagccgtcgccgcagcctccgccgccgagaagcccttgttcccgctgctgggaaggagagtctgtgccgacaagatggcggacggggagctgaacgtggacagcctcatcacccggctgctggaggtacgaggatgtcgtccaggaaagattgtgcagatgactgaagcagaagttcgaggcttatgtatcaagtctcgggagatctttctcagccagcctattcttttggaattggaagcaccgctgaaaatttgtggagatattcatggacaatatacagatttactgagattatttgaatatggaggtttcccaccagaagccaactatcttttcttaggagattatgtggacagaggaaagcagtctttggaaaccatttgtttgctattggcttataaaatcaaatatccagagaacttctttctcttaagaggaaaccatgagtgtgctagcatcaatcgcatttatggattctatgatgaatgcaaacgaagatttaatattaaattgtggaagaccttcactgattgttttaactgtctgcctatagcagccattgtggatgagaagatcttctgttgtcatggaggattgtcaccagacctgcaatctatggagcagattcggagaattatgagacctactgatgtccctgatacaggtttgctctgtgatttgctatggtctgatccagataaggatgtgcaaggctggggagaaaatgatcgtggtgtttcctttacttttggagctgatgtagtcagtaaatttctgaatcgtcatgatttagatttgatttgtcgagctcatcaggtggtggaagatggatatgaattttttgctaaacgacagttggtaaccttattttcagccccaaattactgtggcgagtttgataatgctggtggaatgatgagtgtggatgaaactttgatgtgttcatttcagatattgaaaccatctgaaaagaaagctaaataccagtatggtggactgaattctggacgtcctgtcactccacctcgaacagctaatccgccgaagaaaaggtgaagaaaggaattctgtaaagaaaccatcagatttgttaaggacatacttcataatatataagtgtgcactgtaaaaccatccagccatttgacaccctttatgatgtcacacctttaacttaaggagacgggtaaaggatcttaaatttttttctaatagaaagatgtgctacactgtattgtaataagtatactctgttatagtcaacaaagttaaatccaaattcaaaattatccattaaagttacatcttcatgtatcacaatttttaaagttgaaaagcatcccagttaaactagatgtgatagttaaaccagatgaaagcatgatgatccatctgtgtaatgtggttttagtgttgcttggttgtttaattattttgagcttgttttgtttttgtttgttttcactagaataatggcaaatacttctaatttttttccctaaacatttttaaaagtgaaatatgggaagagctttacagacattcaccaactattattttcccttgtttatctacttagatatctgtttaatcttactaagaaaactttcgcctcattacattaaaaaggaattttagagattgattgttttaaaaaaaaatacgcacattgtccaatccagtgattttaatcatacagtttgactgggcaaactttacagctgatagtgaatattttgctttatacaggaattgacactgatttggatttgtgcactctaatttttaacttattgatgctctattgtgcagtagcatttcatttaagataaggctcatatagtattacccaactagttggtaatgtgattatgtggtaccttggctttaggttttcattcgcacggaacaccttttggcatgcttaacttcctggtaacaccttcacctgcattggttttctttttcttttttctttctttttttttttttttttttttttgagttgttgtttgtttttagatccacagtacatgagaatccttttttgacaagccttggaaagctgacactgtctctttttcctccctctatacgaaggatgtatttaaatgaatgctggtcagtgggacattttgtcaactatgggtattgggtgcttaactgtctaatattgccatgtgaatgttgtatacgattgtaaggcttatgtcactaaagatttttattctgattttttcataatcaaaggtcatatgatactgtatagacaagctttgtagtgaagtatagtagcaataatttctgtacctgatcaagtttattgcagcctttcttttcctatttcttttttttaagggttagtattaacaaatggcaatgagtagaaaagttaacatgaagattttagaaggagagaacttacaggacacagatttgtgattctttgactgtgacactattggatgtgattctaaaagcttttattgagcattgtcaaatttgtaagcttcatagggatggacatcatatctataatgcccttctatatgtgctaccatagatgtgacatttttgaccttaatatcgtctttgaaaatgttaaattgagaaacctgttaacttacattttatgaattggcacattgtattacttactgcaagagatatttcattttcagcacagtgcaaaagttctttaaaatgcatatgtctttttttctaattccgttttgttttaaagcacattttaaatgtagttttctcatttagtaaaagttgtctaattgatatgaagcctgactgattttttttttccttacagtgagacatttaagcacacattttattcacatagatactatgtccttgacatattgaaatgattcttttctgaaagtattcatgatctgcatatgatgtattaggttaggtcacaaaggttttatctgaggtgatttaaataacttcctgattggagtgtgtaagctgagcgatttctaataaaattttagttgtacacttttagtagtcatagtgaagcaggtctagaaaataagcctttggcagggaaaaagggcaatgttgattaatctcagtattaaaccacattaatctgtatcccattgtctggcttttgtaaattcatccaggtcaagactaagtatgttggttaataggaatccttttttttttttaaagactaaatgtgaaaaaataatcactacttaagctaattaatattggtcattaaatttaaaggatggaaatttatcatgtttaaaaattattcaagcactcttaaaaccacttaaacagcctccagtcataaaaatgtgttctttacaaatatttgcttggcaacacgacttgaaataaataaaactttgtttcttaggagaaaa

SEQ ID NO: 123 - protein, 327 aa, Homo sapiens
MADGELNVDSLITRLLEVRGCRPGKIVQMTEAEVRGLCIKSREIFLSQPILLELEAPLKICGDIHGQYTDLLRLFEYGGFPPEANYLFLGDYVDRGKQSLETICLLLAYKIKYPENFFLLRGNHECASINRIYGFYDECKRRFNIKLWKTFTDCFNCLPIAAIVDEKIFCCHGGLSPDLQSMEQIRRIMRPTDVPDTGLLCDLLWSDPDKDVQGWGENDRGVSFTFGADVVSKFLNRHDLDLICRAHQVVEDGYEFFAKRQLVTLFSAPNYCGEFDNAGGMMSVDETLMCSFQILKPSEKKAKYQYGGLNSGRPVTPPRTANPPKKR

SEQ ID NO: 124 - DNA, 1365 bp, Drosophila melanogaster
cacatcactagctgacagaatatatggcttttttacattttgcgttttcaactgaagtttgcgaagaaaccgaagcgtggtaaaccactgaaatcgaaaatatcgacagaaaagcgacctaaagtcggtgaagaagtcgcacgttgatcgttgtgtttttttcccgaaattttctgcaaaaagcccgtgcgtgcgtgagtttctctggctcttgctttttttttgtccatgcgtgtgtgtgtggtcgcataaatttaccgatatttcgcctgtgagagcgaaacgaacgaaaaacgaaagaaaaaaagagagacgagtaaagtaaaacgaaacaggcataaaaacagcagcagttttcttgatatatttggctaaaaaacgcaaaccaaacagccagcaagaacaacaaatagctgggcaaaaacaggacgcacaaaaaataaaattaaaacgataagaggcgaaaagcggagagagtgaaattctcggcagcaacaacgacaagaacaacaccaggagcagcagcaacaacaacaacaaaagccagccgccacaatgagcaaatcactctttgatcttccgttgaccattgaaccagaacatgagttgcgttttgtgggtcccttcacccgacccgttgtcacaatcatgactctgcgcaacaactcggctctgcctctggtcttcaagatcaagacaaccgccccgaaacgctactgcgtacgtccaaacatcggcaagataattccctttcgatcaacccaggtggagatctgccttcagccattcgtctacgatcagcaggagaagaacaagcacaagttcatggtgcagagcgtcctggcacccatggatgctgatctaagcgatttaaataaattgtggaaggatctggagcccgagcagctgatggacgccaaactgaagtgcgttttcgagatgcccaccgctgaggcaaatgctgagaacaccagcggtggtggtgccgttggcggcggaaccggagctgccggaggcggaagcgcgggtgccaatactagctcagccagcgctgaggcgctcgagagcaagccgaagctctccagcgaggataagtttaagccatccaatttgctcgaaacgtctgagagtctggacttgctgtccggagagatcaaagcgctgcgtgaatgcaacattgaattgcgaagagagaatcttcacttgaaggatcaaatcacacgtttccggagctcgccggccgtcaaacaggtgaatgagccctatgccccagtcctggctgagaagcagattccggtcttttacattgcagttgccattgctgcggccatcgttagcctcctgctgggcaaattctttctctga

SEQ ID NO: 125 - protein, 269 aa, Drosophila melanogaster
MSKSLFDLPLTIEPEHELRFVGPFTRPVVTIMTLRNNSALPLVFKIKTTAPKRYCVRPNIGKIIPFRSTQVEICLQPFVYDQQEKNKHKFMVQSVLAPMDADLSDLNKLWKDLEPEQLMDAKLKCVFEMPTAEANAENTSGGGAVGGGTGAAGGGSAGANTSSASAEALESKPKLSSEDKFKPSNLLETSESLDLLSGEIKALRECNIELRRENLHLKDQITRFRSSPAVKQVNEPYAPVLAEKQIPVFYIAVAIAAAIVSLLLGKFFL

SEQ ID NO: 126 - DNA, 2195 bp, Homo sapiens
gcgcgcccacccggtagaggacccccgcccgtgccccgaccggtccccgcctttttgtaaaacttaaagcgggcgcagcattaacgcttcccgccccggtgacctctcaggggtctccccgccaaaggtgctccgccgctaaggaacatggcgaaggtggagcaggtcctgagcctcgagccgcagcacgagctcaaattccgaggtcccttcaccgatgttgtcaccaccaacctaaagcttggcaacccgacagaccgaaatgtgtgttttaaggtgaagactacagcaccacgtaggtactgtgtgaggcccaacagcggaatcatcgatgcaggggcctcaattaatgtatctgtgatgttacagcctttcgattatgatcccaatgagaaaagtaaacacaagtttatggttcagtctatgtttgctccaactgacacttcagatatggaagcagtatggaaggaggcaaaaccggaagaccttatggattcaaaacttagatgtgtgtttgaattgccagcagagaatgataaaccacatgatgtagaaataaataaaattatatccacaactgcatcaaagacagaaacaccaatagtgtctaagtctctgagttcttctttggatgacaccgaagttaagaaggttatggaagaatgtaagaggctgcaaggtgaagttcagaggctacgggaggagaacaagcagttcaaggaagaagatggactgcggatgaggaagacagtgcagagcaacagccccatttcagcattagccccaactgggaaggaagaaggccttagcacccggctcttggctctggtggttttgttctttatcgttggtgtaattattgggaagattgccttgtagaggtagcatgcacaggatggtaaattggattggtggatccaccatatcatgggatttaaatttatcataaccatgtgtaaaaagaaattaatgtatgatgacatctcacaggtcttgcctttaaattacccctccctgcacacacatacacagatacacacacacaaatataatgtaacgatcttttagaaagttaaaaatgtatagtaactgattgagggggaaaagaatgatctttattaatgacaagggaaaccatgagtaatgccacaatggcatattgtaaatgtcattttaaacattggtaggccttggtacatgatgctggattacctctcttaaaatgacacccttcctcgcctgttggtgctggcccttggggagctggagcccagcatgctggggagtgcggtcagctccacacagtagtccccacgtggcccactcccggcccaggctgctttccgtgtcttcagttctgtccaagccatcagctccttgggactgatgaacagagtcagaagcccaaaggaattgcactgtggcagcatcagacgtactcgtcataagtgagaggcgtgtgttgactgattgacccagcgctttggaaataaatggcagtgctttgttcacttaaagggaccaagctaaatttgtattggttcatgtagtgaagtcaaactgttattcagagatgtttaatgcatatttaacttatttaatgtatttcatctcatgttttcttattgtcacaagagtacagttaatgctgcgtgctgctgaactctgttgggtgaactggtattgctgctggagggctgtgggctcctctgtctctggagagtctggtcatgtggaggtggggtttattgggatgctggagaagagctgccaggaagtgttttttctgggtcagtaaataacaactgtcataggcagggaaattctcagtagtgacagtcaactctaggttaccttttttaatgaagagtagtcagtcttctagattgttcttataccacctctcaaccattactcacacttccagcgcccaggtccaagtttgagcctgacctccccttggggacctagcctggagtcaggacaaatggatcgggctgcaaagggttagaagcgagggcaccagcagttgtgggtggggagcaagggaagagagaaactcttcagcgaatccttctagtactagttgagagtttgactgtgaattaattttatgccataaaagaccaacccagttctgtttgactatgtagcatcttgaaaagaaaaattataataaagccccaaaattaaga

SEQ ID NO: 127 - protein, 243 aa, Homo sapiens
MAKVEQVLSLEPQHELKFRGPFTDVVTTNLKLGNPTDRNVCFKVKTTAPRRYCVRPNSGIIDAGASINVSVMLQPFDYDPNEKSKHKFMVQSMFAPTDTSDMEAVWKEAKPEDLMDSKLRCVFELPAENDKPHDVEINKIISTTASKTETPIVSKSLSSSLDDTEVKKVMEECKRLQGEVQRLREENKQFKEEDGLRMRKTVQSNSPISALAPTGKEEGLSTRLLALVVLFFIVGVIIGKIAL

SEQ ID NO: 128 - DNA, 609 bp, Drosophila melanogaster
caaaacgttcagttgtgtttcagttgtcgagaagtcagggtgtttctaccttccatttaccgttccagtgtaaaattcaggcgacacgcttagcgttaccaaggagaaccgctaaaaagggccacttttcaaacggttagattccagtgaagttgtaagcacacagggaacctaaaaaaaaaaaaaacagccaaaatgtctgatcgcaaggccgtgattaaaaatgccgacatgagcgaggagatgcagcaggatgccgtcgattgtgcgacacaggccctcgagaagtacaacattgaaaaggacattgcggcctacatcaagaaggagttcgacaaaaaatacaatcccacatggcattgcattgtcggtcgcaactttggatcgtatgtcacacacgagacgcgccactttatttacttctatttgggccaggtggctattttactgtttaagagcggttaaagtattgtcgagtcggatgaagtggtggtgaggaggctgatggagatgcagcagctgccccgccagcagcaacaacagcaggggcagcagtcgcatttcggagcatcagaggatgaggatctagagcagaaacagcaacaacca

SEQ ID NO: 129 - protein, 89 aa, Drosophila melanogaster
MSDRKAVIKNADMSEEMQQDAVDCATQALEKYNIEKDIAAYIKKEFDKKYNPTWHCIVGRNFGSYVTHETRHFIYFYLGQVAILLFKSG

SEQ ID NO: 130 - DNA, 735 bp, Homo sapiens
gctgtgaggcgccagtgcggagcgggcgggcgggcgggcgggcgggcggcgcgaggcggagcgcgggcggccggcgaaactccaagggcggaccgcggcagggagcgatcggcctcgggctgcgggagccggagaccgcggcggcggcggctgctgcagctgcaggaggagcccagggaacaccgcccctgcctgtgctctgcctcgggccatcgctcctccccagggcccagtgcggactcgcctccgtgaagtgtcacaccatgtctgaccggaaggcagtgatcaagaacgcagacatgtctgaggacatgcaacaggatgccgttgactgcgccacgcaggccatggagaagtacaatatagagaaggacattgctgcctatatcaagaaggaatttgacaagaaatataaccctacctggcattgtatcgtgggccgaaattttggcagctacgtcacacacgagacaaagcacttcatctatttttacttgggtcaagttgcaatcctcctcttcaagtcaggctaggtggccatggtgaaggtgtcagtggcggcggcagcgatggcaagcaggcggcgttgctgggactgttttgcactggagccagcatcaggatgtcctctccaatggctgtgctactgcatggactgtatactcgatttcatgtgtatgtcgcagtaaacaaaaccaaacctcaaaaaaaaaaaaaaaaaaaaaaaaaaaaaaa

SEQ ID NO: 131 - protein, 89 aa, Homo sapiens
MSDRKAVIKNADMSEDMQQDAVDCATQAMEKYNIEKDIAAYIKKEFDKKYNPTWHCIVGRNFGSYVTHETKHFIYFYLGQVAILLFKSG

SEQ ID NO: 132 - DNA, 4901 bp, Drosophila melanogaster
tgttcgcaagtcgagagcagaatcgaacggcaaaaaatgctggcgaacaacaaatcatcaaggtaaaactgcgcgccttggtcattaagtctttcatcgaggataaaagaccgatgtcttttaacgttattgctgtaagcaaaagcagaaatcacaatctactcataaatcctcgatttggtgcaaattaaaggaaattcatcggtttttggcggccagttgcaaacacaaaatactaaatacgctagatggagcacgcatacacgcaagctcgttggcgaacgtaaattacatacatcatatagatagtcgtcccgcttgcactgcccgtcacagcgagggctgcgagagcgagagcgggagagagaaaggcctgagtcgctttttcttcttgtactttatatattttttattgtttttttgtgttgtgttgcgttgtacgtgtgtgtgagagtgccaaatgtcaacggaaattacaacactgcgagacggagaagtctaaaaggcagaagaagaagaagcagcagcaggcagcataaacaaaactcgggggaaaaatgttgcccgccaataacaggagtagcaccagcacccataccaacacaaatgccaacacaatcaacgccactaccaataccaccaacagatgcctcatcaatacggccatcgaaaaaacggtagtccgtttgcgagagacggcagcgaatagcgcaccagctccagccacagcctccgttactcgccacggcggcagcagcagcggcaataacaacaataacagtgcatgccatccagcactggatgccagcagtgatgttgttgttgttgaaccggcagcggtaggagtcgcacaggaggaagaggaagagccggagcaaaggccagagaggatcagcatacccattcccgacctggcgttcaccgagatggaagcatatgccgaggatatagtcgtcgatatggaggggggatcaccagccaagcctttaaatccaaagaaacaacgtttaaactcagcaacaaccacaacaataaatcgctcgaggggcggcggagcggcacagagtcgattacgccggtcggcggccatcgttccaccgcgatcgattccagagagctgtgccagcagcagcaattccaattcgagcagcagttccaacagtaattccagttccagctccgctacaggaagtagcgcatccaccggcaatccgtcgccgtgctcctccctgggcgtcaatatgcgcgtaactggacaatgctgccagggaggccggaaatacatggaggatcagttctcggtggcctaccaggaatcaccgatcacccacgaactggaatacgcattttttggcatctacgacggacacggcggtcccgaggccgcgctcttcgccaaggagcaccttatgctcgagatcgtcaagcagaagcagttctggtctgatcaggatgaggatgtcctgcgggcaatacgcgagggatacatcgccacacatttcgccatgtggcgggaacaagagaaatggccacgcactgccaatgggcatctgagcaccgccggcaccaccgccacagtggcctttatgcgtcgcgagaagatctacattggtcatgtgggtgattctgggatcgttttgggttaccagaacaagggcgaacgcaactggcgtgctcgtccactgaccacggaccacaagccggagtcactggcagagaagacgagaatccagcgttccggcggcaatgttgccatcaaatcgggagttccgcgagtggtatggaaccgacccagggacccaatgcatcgcggtcccattcgccgcagaactctggtagatgaaataccctttttggcggtggctcgttccctgggcgatctctggagctacaattcccgcttcaaggaattcgttgtgagtcccgatccggatgtcaaagtggttaaaataaatcccagtacctttagatgcttaattttcggcaccgatggcctgtggaatgtggtgaccgcccaggaggcggtggacagtgtgcgcaaggagcatctaatcggcgagatactcaacgagcaggacgttatgaatcccagcaaggcgctggtggatcaggccctcaaaacctgggccgccaagaagatgcgtgcggacaacacgtccgttgtgactgtgatactaacaccagcggcccgcaataattcgcccacaacgccaacacgttccccatccgcgatggcacgcgacaatgatctggaggtggagctactgctggaggaggacgacgaggagctgccgacactggatgtggagaacaactaccctgactttctcatcgaggagcatgagtatgtgctggaccagccgtacagtgcattggccaagcgacattcgcctccggaagccttccgcaacttcgactacttcgatgtggacgaggacgagttggatgaagatgaggaaacagtggaagaagacgaggaggaggaggaggaagaggaggaaaccaaatcggtgggaattctacagcaaagtttgttcaaccccagaaaaacgtggcgcaagtcaaccatcaacaattcctggagtggcgtcaccgaaccggaaccggaacccgatcccgaaccagatcgaatagatgtcttaacactggacatgtactcccacaccagcattgacaagggcaccaattatggcggcagcatagcccagtcctcaatagatcctgcggagacggctgaaaatcgtgagctgagtgagttggagcagcatctggagagtagctacagtttcgccgagtcgtacaactccctgttaaacgagcaggaggagcaggaggcacgctcacgttcagcagcagcagcagccgccgccgcagaagcagcagcagtagaagcacaacaaaccactgcccattccgcatccgttgtgctggaccgcagcatgttggagatcatccaggagcagcagcactatcagcagcaagagggctattcgctaacgcaactagagaccagacgtgaaagggagcggctgaccgaatcgtggccacagcagccggctgagctgctcgagctggatgctctactgcagcaggagcgtgccgaggaggagcaggtagccctggagcagcagcagcagcgcgaacagcaaatggagcaaatggaggtggaggccattagtagttcgggacagcacgaatttgcttacccagtgaccaccgccacagccagcgagtggtgtgctacattacaagaagacgaggaggagttggactccacagtaatagacatagtaattcaacccgaacaagagttgcaggacaatgaagtgagctccacgttgcccgccacacccactcatgtggagcctgagcagattgtggacaagatggagcccctgaaggttcaggagatgctaaccgcggtcgaaaaacctccatccaagcaggaaaagaagctgccgaagaagcaagagaccaaacaggttgctgtgctagatacagtggccgagatgcccaaagaggatgcccatgccgtgcactatatattccagcgcattcaaaaggttcaggactctgaggcaacaccagtggccgtgacgaattccacaatggctgacgccctgcccaccgaatctagtggactgggaggatctatgaccgcgccccgaatccgacgctatcgcaacgtgcccaacgagaaccatcagcacatgcagacgcgtcgtcgtcagatcttcaagcatgtcaagccaaagtccttcatacagtccagtgctgcggcgattgtggcctatggagacagcaccgaaacggtcggaggaacagccggagcatctggcacacctgcagctgggcgtgtaggcgggggcggtggcggcggcggcggcagaggatcggccagtggtgggagcagtccagcggtggcagccaatagtcggcggagcgtcaatgtggtggccaatgcgagtggaaacagcgctagcaaagttgtgcccagcagcagttccatgatgatgacccgccgcagtcacaccttgacggccagcggtggtgtgaacaaaaggcagctgcgcagcagtctctgcaccttgggcctgggtgtgggtgtcggtgtcggtctgggcatggacctggacatgaccaagcgcacgctaaggacaaggaatgtacccgctttgtcgggcggttcagccacgccatctagcaattcgtcgccagccagcggaggcagcagtccagccggtttcacaagcccagccagtccggtcatcacgtccaggggaagcggatcgcgtactaccgcctcgccagccaggcgcctaaaacgcagtcatgaggatcgggagcaaagaatgagcttgcgacggagcactctgagtggcagtgccagcggcagtgggctggtgggcactggtgggtcgccctcgaatgtgaaatcaaatcgcctgcaggcctgcaatggagccatctctgcgcgtccgccgccctcgccgaagaaactgaatgcagccgtgcccacattggcaattggaacgcgtgcatatacggcggcgttggcggcggcggcggatcacctgaacaagcggtggtcgttgcgcagcagcagtggcaactctggcaatctgataaccgccatcagttgctacagtgacaggagcagggcggcgactgcggcgggatcaccgggatctggaggcggggcagcgggaccaccaggagcatctttggccgcatccacagtcggcacgcgaaggcgctaggctagattgtaacgaaacatgcgagcaacttgcaagtacaaatcctaagcaacggaaaattttagatcctagtatactactttactgaaaacgcaaaattgcataatttaaccaatttttttatgtgcacaacacacacac

SEQ ID NO: 133 - protein, 1400 aa, Drosophila melanogaster
MLPANNRSSTSTHTNTNANTINATTNTTNRCLINTAIEKTVVRLRETAANSAPAPATASVTRHGGSSSGNNNNNSACHPALDASSDVVVVEPAAVGVAQEEEEEPEQRPERISIPIPDLAFTEMEAYAEDIVVDMEGGSPAKPLNPKKQRLNSATTTTINRSRGGGAAQSRLRRSAAIVPPRSIPESCASSSNSNSSSSSNSNSSSSSATGSSASTGNPSPCSSLGVNMRVTGQCCQGGRKYMEDQFSVAYQESPITHELEYAFFGIYDGHGGPEAALFAKEHLMLEIVKQKQFWSDQDEDVLRAIREGYIATHFAMWREQEKWPRTANGHLSTAGTTATVAFMRREKIYIGHVGDSGIVLGYQNKGERNWRARPLTTDHKPESLAEKTRIQRSGGNVAIKSGVPRVVWNRPRDPMHRGPIRRRTLVDEIPFLAVARSLGDLWSYNSRFKEFVVSPDPDVKVVKINPSTFRCLIFGTDGLWNVVTAQEAVDSVRKEHLIGEILNEQDVMNPSKALVDQALKTWAAKKMRADNTSVVTVILTPAARNNSPTTPTRSPSAMARDNDLEVELLLEEDDEELPTLDVENNYPDFLIEEHEYVLDQPYSALAKRHSPPEAFRNFDYFDVDEDELDEDEETVEEDEEEEEEEEETKSVGILQQSLFNPRKTWRKSTINNSWSGVTEPEPEPDPEPDRIDVLTLDMYSHTSIDKGTNYGGSIAQSSIDPAETAENRELSELEQHLESSYSFAESYNSLLNEQEEQEARSRSAAAAAAAAEAAAVEAQQTTAHSASVVLDRSMLEIIQEQQHYQQQEGYSLTQLETRRERERLTESWPQQPAELLELDALLQQERAEEEQVALEQQQQREQQMEQMEVEAISSSGQHEFAYPVTTATASEWCATLQEDEEELDSTVIDIVIQPEQELQDNEVSSTLPATPTHVEPEQIVDKMEPLKVQEMLTAVEKPPSKQEKKLPKKQETKQVAVLDTVAEMPKEDAHAVHYIFQRIQKVQDSEATPVAVTNSTMADALPTESSGLGGSMTAPRIRRYRNVPNENHQHMQTRRRQIFKHVKPKSFIQSSAAAIVAYGDSTETVGGTAGASGTPAAGRVGGGGGGGGGRGSASGGSSPAVAANSRRSVNVVANASGNSASKVVPSSSSMMMTRRSHTLTASGGVNKRQLRSSLCTLGLGVGVGVGLGMDLDMTKRTLRTRNVPALSGGSATPSSNSSPASGGSSPAGFTSPASPVITSRGSGSRTTASPARRLKRSHEDREQRMSLRRSTLSGSASGSGLVGTGGSPSNVKSNRLQACNGAISARPPPSPKKLNAAVPTLAIGTRAYTAALAAAADHLNKRWSLRSSSGNSGNLITAISCYSDRSRAATAAGSPGSGGGAAGPPGASLAASTVGTRRR

SEQ ID NO: 134 - DNA, 2973 bp, Homo sapiens
ctggctctgctcgctccggcgctccggcccagctctcgcggacaagtccagacatcgcgcgcccccccttctccgggtccgccccctcccccttctcggcgtcgtcgaagataaacaatagttggccggcgagcgcctagtgtgtctcccgccgccggattcggcgggctgcgtgggaccggcgggatcccggccagccggccatggcggggctgtactcgctgggagtgagcgtcttctccgaccagggcgggaggaagtacatggaggacgttactcaaatcgttgtggagcccgaaccgacggctgaagaaaagccctcgccgcggcggtcgctgtctcagccgttgcctccgcggccgtcgccggccgcccttcccggcggcgaagtctcggggaaaggcccagcggtggcagcccgagaggctcgcgaccctctcccggacgccggggcctcgccggcacctagccgctgctgccgccgccgttcctccgtggcctttttcgccgtgtgcgacgggcacggcgggcgggaggcggcacagtttgcccgggagcacttgtggggtttcatcaagaagcagaagggtttcacctcgtccgagccggctaaggtttgcgctgccatccgcaaaggctttctcgcttgtcaccttgccatgtggaagaaactggcggaatggccaaagactatgacgggtcttcctagcacatcagggacaactgccagtgtggtcatcattcggggcatgaagatgtatgtagctcacgtaggtgactcaggggtggttcttggaattcaggatgacccgaaggatgactttgtcagagctgtggaggtgacacaggaccataagccagaacttcccaaggaaagagaacgaatcgaaggacttggtgggagtgtaatgaacaagtctggggtgaatcgtgtagtttggaaacgacctcgactcactcacaatggacctgttagaaggagcacagttattgaccagattccttttctggcagtagcaagagcacttggtgatttgtggagctatgatttcttcagtggtgaatttgtggtgtcacctgaaccagacacaagtgtccacactcttgaccctcagaagcacaagtatattatattggggagtgatggactttggaatatgattccaccacaagatgccatctcaatgtgccaggaccaagaggagaaaaaatacctgatgggtgagcatggacaatcttgtgccaaaatgcttgtgaatcgagcattgggccgctggaggcagcgtatgctccgagcagataacactagtgccatagtaatctgcatctctccagaagtggacaatcagggaaactttaccaatgaagatgagttatacctgaacctgactgacagcccttcctataatagtcaagaaacctgtgtgatgactccttccccatgttctacaccaccagtcaagtcactggaggaggatccatggccaagggtgaattctaaggaccatatacctgccctggttcgtagcaatgccttctcagagaattttttagaggtttcagctgagatagctcgagagaatgtccaaggtgtagtcataccctcaaaagatccagaaccacttgaagaaaattgcgctaaagccctgactttaaggatacatgattctttgaataatagccttccaattggccttgtgcctactaattcaacaaacactgtcatggaccaaaaaaatttgaagatgtcaactcctggccaaatgaaagcccaagaaattgaaagaacccctccaacaaactttaaaaggacattagaagagtccaattctggccccctgatgaagaagcatagacgaaatggcttaagtcgaagtagtggtgctcagcctgcaagtctccccacaacctcacagcgaaagaactctgttaaactcaccatgcgacgcagacttaggggccagaagaaaattggaaatcctttacttcatcaacacaggaaaactgtttgtgtttgctgaaatgcatctgggaaatgaggtttttccaaacttaggatataagagggctttttaaatttggtgccgatgttgaactttttttaaggggagaaaattaaaagaaatatacagtttgactttttggaattcagcagttttatcctggccttgtacttgcttgtattgtaaatgtggattttgtagatgttagggtataagttgctgtaaaatttgtgtaaatttgtatccacacaaattcagtctctgaatacacagtattcagagtctctgatacacagtaattgtgacaatagggctaaatgtttaaagaaatcaaaagaatctattagattttagaaaaacatttaaactttttaaaatacttattaaaaaatttgtataagccacttgtcttgaaaactgtgcaactttttaaagtaaattattaagcagactggaaaagtgatgtattttcatagtgacctgtgtttcacttaatgtttcttagagccaagtgtcttttaaacattattttttatttctgatttcataattcagaactaaatttttcatagaagtgttgagccatgctacagttagtcttgtcccaattaaaatactatgcagtatctcttacatcagtagcatttttctaaaaccttagtcatcagatatgcttactaaatcttcagcatagaaggaagtgtgtttgcctaaaacaatctaaaacaattcccttctttttcatcccagaccaatggcattattaggtcttaaagtagttactcccttctcgtgtttgcttaaaatatgtgaagttttccttgctatttcaataacagatggtgctgctaattcccaacatttcttaaattattttatatcatacagttttcattgattatatgggtatatattcatctaataaatcagtgaactgttcctcatgttgctgaaaaaaaaaaaaaaaaaa

SEQ ID NO: 135 - protein, 605 aa, Homo sapiens
MAGLYSLGVSVFSDQGGRKYMEDVTQIVVEPEPTAEEKPSPRRSLSQPLPPRPSPAALPGGEVSGKGPAVAAREARDPLPDAGASPAPSRCCRRRSSVAFFAVCDGHGGREAAQFAREHLWGFIKKQKGFTSSEPAKVCAAIRKGFLACHLAMWKKLAEWPKTMTGLPSTSGTTASVVIIRGMKMYVAHVGDSGVVLGIQDDPKDDFVRAVEVTQDHKPELPKERERIEGLGGSVMNKSGVNRVVWKRPRLTHNGPVRRSTVIDQIPFLAVARALGDLWSYDFFSGEFVVSPEPDTSVHTLDPQKHKYIILGSDGLWNMIPPQDAISMCQDQEEKKYLMGEHGQSCAKMLVNRALGRWRQRMLRADNTSAIVICISPEVDNQGNFTNEDELYLNLTDSPSYNSQETCVMTPSPCSTPPVKSLEEDPWPRVNSKDHIPALVRSNAFSENFLEVSAEIARENVQGVVIPSKDPEPLEENCAKALTLRIHDSLNNSLPIGLVPTNSTNTVMDQKNLKMSTPGQMKAQEIERTPPTNFKRTLEESNSGPLMKKHRRNGLSRSSGAQPASLPTTSQRKNSVKLTMRRRLRGQKKIGNPLLHQHRKTVCVC

SEQ ID NO: 136 - DNA, 556 bp, Drosophila melanogaster
gatatccggttaacgcaagtgttgctgatcgacaaacaaacccagaatggcacccaggaaggctaaagttcagaaggaggaggttcaggtccagctgggaccccaagttcgcgacggcgagatcgtgttcggagtggctcacatctacgccagcttcaacgacaccttcgtccatgtcactgatctgtccggccgtgagaccatcgctcgtgtcaccggaggcatgaaggtgaaggccgatcgtgatgaggcttcgccctacgccgctatgttggccgctcaggatgtggctgagaagtgcaagacactgggcattactgccctgcatattaagctgcgtgccaccggcggcaacaagaccaagacccccggacccggcgcccagtccgctctgcgtgctttggcccgttcgtccatgaagattggccgcatcgaggatgtgacgcccatcccatcggactccacccgcaggaagggcggtcgccgtggtcgtcgtctgtagatggcagtatctggaaagcagtagtctatgtttgcggtcgaaatacaatactgc

SEQ ID NO: 137 - protein, 151 aa, Drosophila melanogaster
MAPRKAKVQKEEVQVQLGPQVRDGEIVFGVAHIYASFNDTFVHVTDLSGRETIARVTGGMKVKADRDEASPYAAMLAAQDVAEKCKTLGITALHIKLRATGGNKTKTPGPGAQSALRALARSSMKIGRIEDVTPIPSDSTRRKGGRRGRRL

SEQ ID NO: 138 - DNA, 775 bp, Drosophila melanogaster
caagtggttcgtctttaatttttccctcttaatttttgcgaaaaaaaacccgactttgagcccctaaacttaaaaaatgtgccttcctccagagtgttcagagcgtcgactgaaaatgacaaacaagctgcccggcagctaatttttttttacattttttgttttgtttgttcgcacgcatttgtttttatttgtgaaacacgtggtataaatgtggaaattcccttgctattcccgcagttgctgatcgacaaacaaacccagaatggcacccaggaaggctaaagttcagaaggaggaggttcaggtccagctgggaccccaagttcgcgacggcgagatcgtgttcggagtggctcacatctacgccagcttcaacgacaccttcgtccatgtcactgatctgtccggccgtgagaccatcgctcgtgtcaccggaggcatgaaggtgaaggccgatcgtgatgaggcttcgccctacgccgctatgttggccgctcaggatgtggctgagaagtgcaagacactgggcattactgccctgcatattaagctgcgtgccaccggcggcaacaagaccaagacccccggacccggcgcccagtccgctctgcgtgctttggcccgttcgtccatgaagattggccgcatcgaggatgtgacgcccatcccatcggactccacccgcaggaagggcggtcgccgtggtcgtcgtctgtagatggcagtatctggaaagcagtagtctatgtttgcggtcgaaatacaatactgc

SEQ ID NO: 139 - protein, 151 aa, Drosophila melanogaster; identical to SEQ ID NO: 137

SEQ ID NO: 140 - DNA, 589 bp, Homo sapiens
ctccgccctctcccactctctctttccggtgtggagtctggagacgacgtgcagaaatggcacctcgaaaggggaaggaaaagaaggaagaacaggtcatcagcctcggacctcaggtggctgaaggagagaatgtatttggtgtctgccatatctttgcatccttcaatgacacttttgtccatgtcactgatctttctggcaaggaaaccatctgccgtgtgactggtgggatgaaggtaaaggcagaccgagatgaatcctcaccatatgctgctatgttggctgcccaggatgtggcccagaggtgcaaggagctgggtatcaccgccctacacatcaaactccgggccacaggaggaaataggaccaagacccctggacctggggcccagtcggccctcagagcccttgcccgctcgggtatgaagatcgggcggattgaggatgtcacccccatcccctctgacagcactcgcaggaaggggggtcgccgtggtcgccgtctgtgaacaagattcctcaaaatattttctgttaataaattgccttcatgtaaaaaaaaaaaaaaaaaaaaaaaaaaaaaaaa

SEQ ID NO: 141 - protein, 151 aa, Homo sapiens [sequence omitted]

SEQ ID NO: 142 - DNA, 3081 bp, Drosophila melanogaster
aaactaaaaaattgtgttgctgacatctggtcgcttgcaaaactatttctagcagattttgtgatatttcgttgtgatcggtcgataaatccgccagttttttttttaatggaaagtgctaacacattgtagcggttgggaagatagcaggaaagagccagcgggctgccgtttttcctttttgttatccgttgccagacgcaacgaaaacgacagttggcatttgaattcagcacaaacacacatactaacgccgacccgcaagcagcacacacacacacactgggacactcgaaaaaaaaaaaacagacgctgtcggcgacctcgacaagcagttgggttcgatttagttgtcaatgccttgaattcggttcggggcttagtttccacaagtttatcgctcgtcaagaaacaacgaaataaaattattttcgacctaaaaaatctgactaaattgtgttttttgtttatgtatttatttaggcacattttgcacaccacaacgtagttactacatctacgactaacggaactcctcctgcaagcagtggaagttgctgtccatcaagcagtactcggagttaacgcaggataagccgggagaaagagaaagagatcggtggagaatagagatatacaggtggagtcaaagaggaaggatcatggacatgattacggtggggcagagcgtcaagatcaagcggacggatggccgcgtccacatggccgtggtggcggtgatcaaccagtcgggcaagtgcatcacagtcgaatggtacgagcgcggcgaaacgaagggcaaggaggtagaactggacgccatactcacgctcaatccggagctaatgcaagatactgtcgaacagcacgccgccccggagcccaagaaacaagccaccgcgccgatgaacctctcgcgtaatcccacacaatcggctatcggtggcaatctcaccagccgtatgaccatggccggaaacatgctgaacaagatccaggaaagccagtcgattcccaatccgattgtcagcagcaatagcgtgaatacaaacagcaactccaacactacggccggcggaggtggtggcaccacaacgtcgacgaccactggattacagcgtccacggtactcgcaagctgctaccggccagcagcagacaaggatcgcctcggcggtgcctaataacacattgcccaatcccagcgcggcagccagtgctggtccggcggcacaaggagtcgccactgcggccacaacccagggagctggcggcgctagtacccggcgatcgcacgcattgaaagaggtggagcgactgaaggagaatcgcgagaagcgacgcgcccgacaggccgagatgaaggaggagaaggtggcgctgatgaaccaggatccgggcaatccaaactgggagacggcgcaaatgatacgcgaatatcagagcacgctggaatttgtgccgctgctcgatggccaggccgtcgatgaccatcagatcacagtgtgcgtgcgcaagcgtcccattagccgcaaggaggtcaatcgcaaggagatcgatgtcatttcggtgccgcgcaaggacatgctcatcgtgcacgagccgcgcagcaaggtcgacctcaccaagttcctggagaaccacaagtttcgcttcgactacgccttcaacgacacgtgcgacaatgccatggtatacaaatacacagccaagccgttggtgaaaaccattttcgagggcggaatggcgacgtgcttcgcctacggccagacgggatcgggcaaaacgcacaccatgggcggtgagtttaatggaaaggtgcaggactgcaagaacggcatctacgccatggcggccaaggatgtctttgtgaccctgaatatgccgcgttaccgcgccatgaatctagtcgtctcggccagtttctttgagatttacagtggcaaggtcttcgatcttctgtccgacaagcagaaactgcgcgtcctggaggatggtaaacagcaagtgcaggtggtgggactcaccgagaaggtggtcgatggcgtcgaggaggtactgaagctcatccagcacggcaatgctgcccgaacatccggccagacgtcggccaactccaattcgtcgcgttcgcacgccgttttccagattgtgctgcggccgcagggctcgacgaagatccatggcaagttctcgttcatcgatctggcgggcaatgagcggggcgtggacacttcctcggccgatcggcagacgcgtatggagggtgccgagattaacaaatcgctgctggccctcaaggagtgcattcgtgcgttgggcaaacagtcggcccacttgcccttccgtgtctccaaactcacccaggtgctgcgcgactcgttcattggcgagaagagcaagacgtgcatgatagccatgatctcgccgggacttagctcctgcgagcacacgctcaacacgctgcgctatgcggatcgtgtcaaggagctggtggtcaaggatatcgtcgaagtttgccctggcggcgacaccgagcccatcgagatcacggacgacgaggaggaggaggagctcaacatggtgcatccgcactcgcatcagctgcatcccaattcgcatgcaccggccagccagtcgaataatcagcgtgctccggcctctcatcactcgggggcggtcattcacaacaataataataacaacaacaagaacggaaacgccggcaacatggacctggccatgctgagttcgctgagcgaacacgagatgtccgacgagctgattgtgcagcaccaggccatcgacgacctgcagcagacggaggagatggtggtggagtatcatcgcaccgttaatgccacactggagaccttcctcgccgagtcgaaggcgctgtacaatctgaccaactatgtggactacgaccaggactcgtactgcaaacggggcgagtcgatgttctcgcagctgctggacatcgccatccagtgccgcgacatgatggccgaatatcgcgccaagttggccaaggaggagatgctgtcgtgcagcttcaattcgccgaatggcaagcgttagt

SEQ ID NO: 143 - protein, 803 aa, Drosophila melanogaster
MITVGQSVKIKRTDGRVHMAVVAVINQSGKCITVEWYERGETKGKEVELDAILTLNPELMQDTVEQHAAPEPKKQATAPMNLSRNPTQSAIGGNLTSRMTMAGNMLNKIQESQSIPNPIVSSNSVNTNSNSNTTAGGGGGTTTSTTTGLQRPRYSQAATGQQQTRIASAVPNNTLPNPSAAASAGPAAQGVATAATTQGAGGASTRRSHALKEVERLKENREKRRARQAEMKEEKVALMNQDPGNPNWETAQMIREYQSTLEFVPLLDGQAVDDHQITVCVRKRPISRKEVNRKEIDVISVPRKDMLIVHEPRSKVDLTKFLENHKFRFDYAFNDTCDNAMVYKYTAKPLVKTIFEGGMATCFAYGQTGSGKTHTMGGEFNGKVQDCKNGIYAMAAKDVFVTLNMPRYRAMNLVVSASFFEIYSGKVFDLLSDKQKLRVLEDGKQQVQVVGLTEKVVDGVEEVLKLIQHGNAARTSGQTSANSNSSRSHAVFQIVLRPQGSTKIHGKFSFIDLAGNERGVDTSSADRQTRMEGAEINKSLLALKECIRALGKQSAHLPFRVSKLTQVLRDSFIGEKSKTCMIAMISPGLSSCEHTLNTLRYADRVKELVVKDIVEVCPGGDTEPIEITDDEEEEELNMVHPHSHQLHPNSHAPASQSNNQRAPASHHSGAVIHNNNNNNNKNGNAGNMDLAMLSSLSEHEMSDELIVQHQAIDDLQQTEEMVVEYHRTVNATLETFLAESKALYNLTNYVDYDQDSYCKRGESMFSQLLDIAIQCRDMMAEYRAKLAKEEMLSCSFNSPNGKR

SEQ ID NO: 144 - DNA, 1023 bp, Drosophila melanogaster
cgtaataacgcctcctgatatcgatatcgatatcatatcacaaaaaacaataaaccaaaaaagaaacgctaaaaactagtagttttgtgtgccaggaaaacggaaaggtggacatagttaagttaccacaacaaccgacggatatcgactccagacaccacatcgcccagcgccaccatggacatcatggatatccaggccgtagagtccaagctgagtgacgtcacggtgacaccgataccgcgcagccaagtgcagaatttctacaattaccagcagcagcgggagcagcgcgagcagcagccccaaatccagatatcggccatccaccactcgcgtggatccgttggcggaggaggcggatccaactcatccaacgctgccaccgactactccacgagcagcggtggcaagcgggagcgggaccgctcctccgccagcgactacagcagctcgtccagcaagcagagctccgctgcagcggccaatgcagcagcagctgccgccgccgtcgctgccctccaatactccccgcagttcctccaggcccagctggcgctactccagcagcagtcgaacacgacggccacgccggcagccgtcgccgctgcggccctctcgctggccaacatgtgctccagcaatggtggtcagcggaattccggtgccggcgtttcctccacctcctctggcagcaatggccagagcatgggcctgaatctgagctcatcgcagctaaagtacccgccaccctccacctcgcccgtggtggtgaccacccaaacttcggccaatatcaccacgccgctgacctccacggccagcctgccctcagtgggcccgggcaatgggctgaccaagtacgcccagctgctggccgtcattgaggagatgggccgcgatatccggcccacgtacacgggctcgcgcagctccacggagcgtctcaagcggggcattgtccatgcccgcatcctggtgcgcgaatgcctcatggaaacggagcgtgcggcgcgccaatga

SEQ ID NO: 145 - protein, 278 aa, Drosophila melanogaster
MDIQAVESKLSDVTVTPIPRSQVQNFYNYQQQREQREQQPQIQISAIHHSRGSVGGGGGSNSSNAATDYSTSSGGKRERDRSSASDYSSSSSKQSSAAAANAAAAAAAVAALQYSPQFLQAQLALLQQQSNTTATPAAVAAAALSLANMCSSNGGQRNSGAGVSSTSSGSNGQSMGLNLSSSQLKYPPPSTSPVVVTTQTSANITTPLTSTASLPSVGPGNGLTKYAQLLAVIEEMGRDIRPTYTGSRSSTERLKRGIVHARILVRECLMETERAARQ

SEQ ID NO: 146 - DNA, 2905 bp, Homo sapiens
ggccgaatacatcaagcaatggtaacatctttaaatgaagataatgaaagtgtaactgttgaatggatagaaaatggagatacaaaaggcaaagagattgacctggagagcatcttttcacttaaccctgaccttgttcctgatgaagaaattgaacccagtccagaaacacctccacctccagcatcctcagccaaagtaaacaaaattgtaaagaatcgacggactgtagcttctattaagaatgaccctccttcaagagataatagagtggttggttcagcacgtgcacggcccagtcaatttcctgaacagtcttcctctgcacaacagaatggtagtgtttcagatatatctccagttcaagctgcaaaaaaggaatttggacccccttcacgtagaaaatctaattgtgtgaaagaagtagaaaaactgcaagaaaaacgagagaaaaggagattgcaacagcaagaacttagagaaaaaagagcccaggacgttgatgctacaaacccaaattatgaaattatgtgtatgatcagagactttagaggaagtttggattatagaccattaacaacagcagatcctattgatgaacataggatatgtgtgtgtgtaagaaaacgaccactcaataaaaaagaaactcaaatgaaagatcttgatgtaatcacaattcctagtaaagatgttgtgatggtacatgaaccaaaacaaaaagtagatttaacaaggtacctagaaaaccaaacatttcgttttgattatgcctttgatgactcagctcctaatgaaatggtttacaggtttactgctaaaccactagtggaaactatatttgaaaggggaatggctacatgctttgcttatgggcagactggaagtggaaaaactcatactatgggtggtgacttttcaggaaagaaccaagattgttctaaaggaatttatgcattagcagctcgagatgtctttttaatgctaaagaagccaaactataagaagctagaacttcaagtatatgcaaccttctttgaaatttatagtggaaaggtgtttgacttgctaaacaggaaaacaaaattaagagttctagaagatggaaaacagcaggttcaagtggtgggattacaggaacgggaggtcaaatgtgttgaagatgtactgaaactcattgacataggcaacagttgcagaacatccggtcaaacatctgcaaatgcacattcatctcggagccatgcagtgtttcagattattcttagaaggaaaggaaaactacatggcaaattttctctcattgatttggctggaaatgaaagaggagctgatacttccagtgcggacaggcaaactaggcttgaaggtgctgaaattaataaaagccttttagcactcaaggagtgcatcagagccttaggtagaaataaacctcatactcctttccgtgcaagtaaactcactcaggtgttaagagattctttcataggtgaaaactctcgtacctgcatgattgccacaatctctccaggaatggcatcctgtgaaaatactcttaatacattaagatatgcaaatagggtcaaagaattgactgtagatccaactgctgctggtgatgttcgtccaataatgcaccatccaccaaaccagattgatgacttagagacacagtggggtgtggggagttcccctcagagagatgatctaaaacttctttgtgaacaaaatgaagaagaagtctctccacagttgtttactttccacgaagctgtttcacaaatggtagaaatggaagaacaagttgtagaagatcacagggcagtgttccaggaatctattcggtggttagaagatgaaaaggccctcttagagatgactgaagaagtagattatgatgtcgattcatatgctacacaacttgaagctattcttgagcaaaaaatagacattttaactgaactgcgggataaagtgaaatctttccgtgcagctctacaagaggaggaacaagccagcaagcaaatcaacccgaagagaccccgtgccctttaaaccggcatttgctgctaaaggatacccagaaccctcactactgtaacatacaacggttcagctgtaagggccatttgaaagtttggaattttaagtgtctgtggaaaatgttttgtccttcacctgaattacatttcaattttgtgaaacactcttttgtctacaaaatgcttctagtccaggaggcacaaccaagaactgggattaatgaagcattttgtttcatttacacaaatagtgatttacttttggagatccttgtcagttttattttctatttgatgaagtaagactgtggactcaatccagagccagatagtaggggaagccacagcatttccttttaactcagttcaatttttgtagtgagactgagcagttttaaatcctttgcgtgcatgcatacctcatcagtgattgtacataccttgcccactcctagagacagctgtgctcacttttcctgctttgtgccttgattaaggctactgaccctaaatttctgaagcacagccaagaaaaattacattccttgtcattgtaaattacctttgtgtgtacatttttactgtatttgagacattttttgtgtgtgactagttaattttgcaggatgtgccatatcattgaacggaactaaagtctgtgacagtggatatagctgctggaccattccatcttatatgtaaagaaatctggaattattattttaaaaccatataacatgtgattataatttttcttagcattttctttgtaaagaactacaatataaactagttggtgtataataaaaagtaatgaaattctgaagaaaaaaaaaaaaaaaaaaaaaaaaaaaaaaaaa

SEQ ID NO: 147 - protein, 679 aa, Homo sapiens
MVTSLNEDNESVTVEWIENGDTKGKEIDLESIFSLNPDLVPDEEIEPSPETPPPPASSAKVNKIVKNRRTVASIKNDPPSRDNRVVGSARARPSQFPEQSSSAQQNGSVSDISPVQAAKKEFGPPSRRKSNCVKEVEKLQEKREKRRLQQQELREKRAQDVDATNPNYEIMCMIRDFRGSLDYRPLTTADPIDEHRICVCVRKRPLNKKETQMKDLDVITIPSKDVVMVHEPKQKVDLTRYLENQTFRFDYAFDDSAPNEMVYRFTAKPLVETIFERGMATCFAYGQTGSGKTHTMGGDFSGKNQDCSKGIYALAARDVFLMLKKPNYKKLELQVYATFFEIYSGKVFDLLNRKTKLRVLEDGKQQVQVVGLQEREVKCVEDVLKLIDIGNSCRTSGQTSANAHSSRSHAVFQIILRRKGKLHGKFSLIDLAGNERGADTSSADRQTRLEGAEINKSLLALKECIRALGRNKPHTPFRASKLTQVLRDSFIGENSRTCMIATISPGMASCENTLNTLRYANRVKELTVDPTAAGDVRPIMHHPPNQIDDLETQWGVGSSPQRDDLKLLCEQNEEEVSPQLFTFHEAVSQMVEMEEQVVEDHRAVFQESIRWLEDEKALLEMTEEVDYDVDSYATQLEAILEQKIDILTELRDKVKSFRAALQEEEQASKQINPKRPRAL

SEQ ID NO: 148 - DNA, 1158 bp, Homo sapiens
accgcccggcctcgccgccgccgccgccgccctcgcggcctggccccgccgcgcccggcgcgcccgccgcccggggggatgtcttacaaaccgaacttggccgcgcacatgcccgccgccgccctcaacgccgctgggagtgtccactcgccttccaccagcatggcaacgtcttcacagtaccgccagctgctcagtgactacgggccaccgtccctaggctacacccagggaactgggaacagccaggtgccccaaagcaaatacgcggagctgctggccatcattgaagagctggggaaggagatcagacccacgtacgcagggagcaagagtgccatggagaggctgaagcgcggcatcattcacgctagaggactggttcgggagtgcttggcagaaacggaacggaatgccagatcctagctgccttgttggttttgaaggatttccatctttttacaagatgagaagttacagttcatctcccctgttcagatgaaacccttgttttcaaaatggttacagtttcgtttttcctcccatggttcacttggctctgaacctacagtctcaaagattgagaaaagattttgcagttaattaggatttgcattttaagtagttaggaactgcccaggttttttttgttttttaagcattgatttaaaagatgcacggaaagttatcttacagcaaactgtagtttgcctccaagacaccattgtctccctttaatcttctcttttgtatacatttgttacccatggtgttctttgttccttttcataagctaataccactgtagggattttgttttgaacgcatattgacagcacgctttacttagtagccggttcccatttgccatacaatgtaggttctgcttaatgtaacttcttttttgcttaagcatttgcatgactattagtgcttcaaagtcaatttttaaaaatgcacaagttataaatacagaagaaagagcaacccaccaaacctaacaaggacccccgaacactttcatactaagactgtaagtagatctcagttctgcgtttattgtaagttgataaaaacatctgggaggaaatgactaaaactgtttgcatctttgtatgtatttattacttgatgtaataaagcttattttcattaacc

SEQ ID NO: 149 - protein, 115 aa, Homo sapiens
MSYKPNLAAHMPAAALNAAGSVHSPSTSMATSSQYRQLLSDYGPPSLGYTQGTGNSQVPQSKYAELLAIIEELGKEIRPTYAGSKSAMERLKRGIIHARGLVRECLAETERNARS

SEQ ID NO: 150 - DNA, 607 bp, Drosophila melanogaster
  misc_feature 565, 576, 587, 590, 591: n is a or g or c or t
catcatgtatcatacattgaagacggattagcaccgtcgaccacgaaaaaagaacgcaaggaaatcgtgcaaaatgttcaaaaagtacgtatggcatgagttagatggggacatcagactaaccatagcaattcgatctgtgcagattcgaagagaaggacagcatttccagcattcagcagctgaagtcgtctgtgcagaagggcatacgtgccaagttgctggaggcctatcccaagttggagagtcacatcgacctgatcctgcccaagaaggactcgtaccgcatcgccaagtggtaggatggctcagttcttgccacagcacataactccattcatattcccgatccctactcctccaccagccatgaccacatcgaactgctgctaaacggagccggcgaccaggtgttctttcgccaccgcgatggcccctggatgcctaccctgcgcaactgttgggaagggcgatcggtgcgggcctcttcgctattacgccagctggcgaaaggggggatgtgctgcaaggcgattaagttgggtaacgccagggttttcccagncacgacgttgnaaaacgacggncanngccaagctctgctgct

SEQ ID NO: 151 - DNA, 630 bp, Drosophila melanogaster
cggattagcaccgtcgaccacgaaaaaagaacgcaaggaaatcgtgcaaaatgttcaaaaaattcgaagagaaggacagcatttccagcattcagcagctgaagtcgtctgtgcagaagggcatacgtgccaagttgctggaggcctatcccaagttggagagtcacatcgacctgatcctgcccaagaaggactcgtaccgcatcgccaagtgccatgaccacatcgaactgctgctaaacggagccggcgaccaggtgttctttcgccaccgcgatggcccctggatgcctaccctgcgcctcctgcacaagttcccctacttcgtgaccatgcagcaagtggacaaaggcgccatccgcttcgtcctgagcggagcgaacgtcatgtgtcccggcctcacatcgccaggcgcctgtatgacgccggccgacaaggacaccgtggtggccatcatggctgagggcaaggagcacgccctggccgttggactcctcacgttatccacacaggaaattctggcgaagaacaaaggcatcggtatcgagacgtaccacttcctcaacgacggcctgtggaagtcgaagcccgtgaagtaggcgaaataggaatctgcacttgcacttttta

SEQ ID NO: 152 - protein, 182 aa, Drosophila melanogaster
MFKKFEEKDSISSIQQLKSSVQKGIRAKLLEAYPKLESHIDLILPKKDSYRIAKCHDHIELLLNGAGDQVFFRHRDGPWMPTLRLLHKFPYFVTMQQVDKGAIRFVLSGANVMCPGLTSPGACMTPADKDTVVAIMAEGKEHALAVGLLTLSTQEILAKNKGIGIETYHFLNDGLWKSKPVK

SEQ ID NO: 153 - DNA, 943 bp, Homo sapiens
gctacctccaactgctgaggaaccggttgcctaaaaggagccggcaaaagcgcctacgtggagtccagaggagcggaagtagtcagatttgactgagagccgtaaagcgcggctggctctcgttttccggataacgactacagctccgactgtcagtgccggccttcctcgtgtgaggggatctgccggacccctgcaaattcaatttctttcccattccgggcccttccctatcgtcgcccccttcaccttggatcatgttcaagaaatttgatgaaaaagaaaatgtgtccaactgcatccagttgaaaacttcagttattaagggtattaagaatcaattgatagagcaatttccaggtattgaaccatggcttaatcaaatcatgcctaagaaagatcctgtcaaaatagtccgatgccatgaacatatagaaatccttacagtaaatggagaattactcttttttagacaaagagaagggcctttttatccaaccctaagattacttcacaaatatccttttatcctgccacaccagcaggttgataaaggagccatcaaatttgtactcagtggagcaaatatcatgtgtccaggcttaacttctcctggagctaagctttaccctgctgcagtagataccattgttgctatcatggcagaaggaaaacagcatgctctatgtgttggagtcatgaagatgtctgcagaagacattgagaaagtcaacaaaggaattggcattgaaaatatccattatttaaatgatgggctgtggcatatgaagacatataaatgagcctcagaaggaatgcacttgggctaaatatggatattgtgctgtatctgtgtttgtgtctgtgtgtgacagcatgaagataatgcctgtggttatgctgaataaattcaccagatgctaaaaaaaaaaaaaaaaaaaaa

SEQ ID NO: 154 - protein, 181 aa, Homo sapiens
MFKKFDEKENVSNCIQLKTSVIKGIKNQLIEQFPGIEPWLNQIMPKKDPVKIVRCHEHIEILTVNGELLFFRQREGPFYPTLRLLHKYPFILPHQQVDKGAIKFVLSGANIMCPGLTSPGAKLYPAAVDTIVAIMAEGKQHALCVGVMKMSAEDIEKVNKGIGIENIHYLNDGLWHMKTYK

SEQ ID NO: 155 - DNA, 1771 bp, Drosophila melanogaster
acgccgcatgcacttttttatctatgatattatgtttattatttcattattgaatcgggaaaaccaaacgtttttttttttttcgtatacaaatccatttgcagtttgtaaactttagcgtgcattcgcatctaatagtgatatgttttcgcttttcacaggtgatgaaccaggacgtgaagaaggagaatcccttgcagtttaggttccgtgccaaattctatcccgaggatgtggccgaggagctgatccaggacattacactgcgtctgttctacctgcaggtgaagaatgccatactgaccgacgagatctattgtccgccagagacatccgtgctgctcgcctcgtacgccgtccaggcgcgtcatggtgaccacaataagaccacccacacagccggctttctggccaacgatcgcctgctgccgcagcgcgtcatcgaccagcacaagatgtccaaggacgagtgggagcagtcgattatgacctggtggcaggagcatcgcagcatgctgcgcgaggatgccatgatggagtatctgaagatcgcccaagacctggagatgtacggcgttaactactttgagatccgcaacaagaagggcacggatctttggctgggcgtagacgcactgggtctgaacatttacgagcaggacgataggttgacgccgaaaattggtttcccatggtccgagattcgcaacatttcgttctcggagaagaagttcatcatcaagccgatcgacaagaaggctccggactttatgttctttgcgccacgtgtccgcatcaacaagcgcattctggccctctgcatgggcaaccacgagctgtacatgcgtcgccgcaagccggacaccatcgatgtgcagcagatgaaggcgcaggcgcgcgaggagaagaatgccaaacagcaggaacgtgagaagctgcagctggcgctggccgcacgcgaacgcgctgaaaagaagcagcaggagtacgaggatcggctaaagcagatgcaggaggacatggagcgttcgcagcgcgatctgcttgaggcgcaggacatgatccgccggctggaggagcagctgaagcagctgcaggccgccaaggatgagctggagctgcgccagaaggagctgcaggcgatgctgcagcgcctcgaggaggccaagaatatggaggccgtcgagaagctcaagctcgaggaggagatcatggccaagcagatggaggtgcagcgcattcaggacgaggtcaacgccaaggatgaggagacaaagcgtctgcaggacgaagtggaagacgcccgacgcaagcaggtcattgcggctgaagccgctgccgctctgctggccgcgtcgacaacgccgcagcatcaccacgtggccgaggatgagaacgagaacgaggaggagctgacgaacggcgatgccggtggcgatgtgtcgcgcgacctggacaccgacgagcatatcaaggaccccatcgaggacagacgcacgctggccgagcgcaacgaacgcttgcacgatcagctcaaggctctgaaacaagatttggcgcagtctcgcgacgagacgaaagagacggcaaacgataagattcatcgcgagaacgttcgccagggacgtgacaagtacaagacgctccgcgagattcgtaagggcaacacaaagcgtcgcgtcgatcagtttgagaacatgtaaaagctatcaaagatcagagatcgatagtgcgcgggaaagagagagggagcggtgagactccagaaaga

SEQ ID NO: 156 - protein, 512 aa, Drosophila melanogaster
MNQDVKKENPLQFRFRAKFYPEDVAEELIQDITLRLFYLQVKNAILTDEIYCPPETSVLLASYAVQARHGDHNKTTHTAGFLANDRLLPQRVIDQHKMSKDEWEQSIMTWWQEHRSMLREDAMMEYLKIAQDLEMYGVNYFEIRNKKGTDLWLGVDALGLNIYEQDDRLTPKIGFPWSEIRNISFSEKKFIIKPIDKKAPDFMFFAPRVRINKRILALCMGNHELYMRRRKPDTIDVQQMKAQAREEKNAKQQEREKLQLALAARERAEKKQQEYEDRLKQMQEDMERSQRDLLEAQDMIRRLEEQLKQLQAAKDELELRQKELQAMLQRLEEAKNMEAVEKLKLEEEIMAKQMEVQRIQDEVNAKDEETKRLQDEVEDARRKQVIAAEAAAALLAASTTPQHHHVAEDENENEEELTNGDAGGDVSRDLDTDEHIKDPIEDRRTLAERNERLHDQLKALKQDLAQSRDETKETANDKIHRENVRQGRDKYKTLREIRKGNTKRRVDQFENM

SEQ ID NO: 157 - DNA, 2196 bp, Drosophila melanogaster
gacaacagaatcgaatcgtcgcttttccgcttttaaccatcgtgtcgcgttggtcggttggttttcccgcgtagcttgtggctgctcaagaatatatatatatttcccagacggagatttgcattgaaaaggcgtaataattcaaaagctactgcgcaatccgttttcggtgcccaaaatggtcgtcgtctccgacagccgcgtccgtttgccgcgttacggcggagtcagcgtcaaacggaaaacgctaaatgtgcgcgtcacgacaatggacgcggaactggagttcgccattcagtcgacgacgacgggcaagcaattgtttgaccaggtggtgaagacgatcggcctgcgagaggtttggttctttggactccagtacaccgactccaagggcgactccacatggatcaagctgtacaaaaagcccgaatcgccggccataaagacaataaaatatttaaagcgtgtaaagaagtatgtggacaaaaagacagccgacagcaatggagtaaatcatttagagacgagcgaagaggatgacgacgccgatgatatgactggatcaatgccgttttcgacatgggtgatgaaccaggacgtgaagaaggagaatcccttgcagtttaggttccgtgccaaattctatcccgaggatgtggccgaggagctgatccaggacattacactgcgtctgttctacctgcaggtgaagaatgccatactgaccgacgagatctattgtccgccagagacatccgtgctgctcgcctcgtacgccgtccaggcgcgtcatggtgaccacaataagaccacccacacagccggctttctggccaacgatcgcctgctgccgcagcgcgtcatcgaccagcacaagatgtccaaggacgagtgggagcagtcgattatgacctggtggcaggagcatcgcagcatgctgcgcgaggatgccatgatggagtatctgaagatcgcccaagacctggagatgtacggcgttaactactttgagatccgcaacaagaagggcacggatctttggctgggcgtagacgcactgggtctgaacatttacgagcaggacgataggttgacgccgaaaattggtttcccatggtccgagattcgcaacatttcgttctcggagaagaagttcatcatcaagccgatcgacaagaaggctccggactttatgttctttgcgccacgtgtccgcatcaacaagcgcattctggccctctgcatgggcaaccacgagctgtacatgcgtcgccgcaagccggacaccatcgatgtgcagcagatgaaggcgcaggcgcgcgaggagaagaatgccaaacagcaggaacgtgagaagctgcagctggcgctggccgcacgcgaacgcgctgaaaagaagcagcaggagtacgaggatcggctaaagcagatgcaggaggacatggagcgttcgcagcgcgatctgcttgaggcgcaggacatgatccgccggctggaggagcagctgaagcagctgcaggccgccaaggatgagctggagctgcgccagaaggagctgcaggcgatgctgcagcgcctcgaggaggccaagaatatggaggccgtcgagaagctcaagctcgaggaggagatcatggccaagcagatggaggtgcagcgcattcaggacgaggtcaacgccaaggatgaggagacaaagcgtctgcaggacgaagtggaagacgcccgacgcaagcaggtcattgcggctgaagccgctgccgctctgctggccgcgtcgacaacgccgcagcatcaccacgtggccgaggatgagaacgagaacgaggaggagctgacgaacggcgatgccggtggcgatgtgtcgcgcgacctggacaccgacgagcatatcaaggaccccatcgaggacagacgcacgctggccgagcgcaacgaacgcttgcacgatcagctcaaggctctgaaacaagatttggcgcagtctcgcgacgagacgaaagagacggcaaacgataagattcatcgcgagaacgttcgccagggacgtgacaagtacaagacgctccgcgagattcgtaagggcaacacaaagcgtcgcgtcgatcagtttgagaacatgtaaaagctatcaaagatcagagatcgatagtgcgcgggaaagagagagggagcggtgagactccagaaaga

SEQ ID NO: 158 - protein, 649 aa, Drosophila melanogaster
MVVVSDSRVRLPRYGGVSVKRKTLNVRVTTMDAELEFAIQSTTTGKQLFDQVVKTIGLREVWFFGLQYTDSKGDSTWIKLYKKPESPAIKTIKYLKRVKKYVDKKTADSNGVNHLETSEEDDDADDMTGSMPFSTWVMNQDVKKENPLQFRFRAKFYPEDVAEELIQDITLRLFYLQVKNAILTDEIYCPPETSVLLASYAVQARHGDHNKTTHTAGFLANDRLLPQRVIDQHKMSKDEWEQSIMTWWQEHRSMLREDAMMEYLKIAQDLEMYGVNYFEIRNKKGTDLWLGVDALGLNIYEQDDRLTPKIGFPWSEIRNISFSEKKFIIKPIDKKAPDFMFFAPRVRINKRILALCMGNHELYMRRRKPDTIDVQQMKAQAREEKNAKQQEREKLQLALAARERAEKKQQEYEDRLKQMQEDMERSQRDLLEAQDMIRRLEEQLKQLQAAKDELELRQKELQAMLQRLEEAKNMEAVEKLKLEEEIMAKQMEVQRIQDEVNAKDEETKRLQDEVEDARRKQVIAAEAAAALLAASTTPQHHHVAEDENENEEELTNGDAGGDVSRDLDTDEHIKDPIEDRRTLAERNERLHDQLKALKQDLAQSRDETKETANDKIHRENVRQGRDKYKTLREIRKGNTKRRVDQFENM

SEQ ID NO: 159 - DNA, 2097 bp, Drosophila melanogaster
ccaaagcgaaacgggagctcttggcacgtgccctgctcacatcccgttaatccatcgacccctaaacaaatcgtgggggattctcctctgcacgccaccttcatcgatgggtgtcaattttttactcttttttttttctatttggcttctaaatgtgcgcgtcacgacaatggacgcggaactggagttcgccattcagtcgacgacgacgggcaagcaattgtttgaccaggtggtgaagacgatcggcctgcgagaggtttggttctttggactccagtacaccgactccaagggcgactccacatggatcaagctgtacaaaaagcccgaatcgccggccataaagacaataaaatatttaaagcgtgtaaagaagtatgtggacaaaaagacagccgacagcaatggagtaaatcatttagagacgagcgaagaggatgacgacgccgatgatatgactggatcaatgccgttttcgacatgggtgatgaaccaggacgtgaagaaggagaatcccttgcagtttaggttccgtgccaaattctatcccgaggatgtggccgaggagctgatccaggacattacactgcgtctgttctacctgcaggtgaagaatgccatactgaccgacgagatctattgtccgccagagacatccgtgctgctcgcctcgtacgccgtccaggcgcgtcatggtgaccacaataagaccacccacacagccggctttctggccaacgatcgcctgctgccgcagcgcgtcatcgaccagcacaagatgtccaaggacgagtgggagcagtcgattatgacctggtggcaggagcatcgcagcatgctgcgcgaggatgccatgatggagtatctgaagatcgcccaagacctggagatgtacggcgttaactactttgagatccgcaacaagaagggcacggatctttggctgggcgtagacgcactgggtctgaacatttacgagcaggacgataggttgacgccgaaaattggtttcccatggtccgagattcgcaacatttcgttctcggagaagaagttcatcatcaagccgatcgacaagaaggctccggactttatgttctttgcgccacgtgtccgcatcaacaagcgcattctggccctctgcatgggcaaccacgagctgtacatgcgtcgccgcaagccggacaccatcgatgtgcagcagatgaaggcgcaggcgcgcgaggagaagaatgccaaacagcaggaacgtgagaagctgcagctggcgctggccgcacgcgaacgcgctgaaaagaagcagcaggagtacgaggatcggctaaagcagatgcaggaggacatggagcgttcgcagcgcgatctgcttgaggcgcaggacatgatccgccggctggaggagcagctgaagcagctgcaggccgccaaggatgagctggagctgcgccagaaggagctgcaggcgatgctgcagcgcctcgaggaggccaagaatatggaggccgtcgagaagctcaagctcgaggaggagatcatggccaagcagatggaggtgcagcgcattcaggacgaggtcaacgccaaggatgaggagacaaagcgtctgcaggacgaagtggaagacgcccgacgcaagcaggtcattgcggctgaagccgctgccgctctgctggccgcgtcgacaacgccgcagcatcaccacgtggccgaggatgagaacgagaacgaggaggagctgacgaacggcgatgccggtggcgatgtgtcgcgcgacctggacaccgacgagcatatcaaggaccccatcgaggacagacgcacgctggccgagcgcaacgaacgcttgcacgatcagctcaaggctctgaaacaagatttggcgcagtctcgcgacgagacgaaagagacggcaaacgataagattcatcgcgagaacgttcgccagggacgtgacaagtacaagacgctccgcgagattcgtaagggcaacacaaagcgtcgcgtcgatcagtttgagaacatgtaaaagctatcaaagatcagagatcgatagtgcgcgggaaagagagagggagcggtgagactccagaaaga

SEQ ID NO: 160 - protein, 640 aa, Drosophila melanogaster
MGVNFLLFFFSIWLLNVRVTTMDAELEFAIQSTTTGKQLFDQVVKTIGLREVWFFGLQYTDSKGDSTWIKLYKKPESPAIKTIKYLKRVKKYVDKKTADSNGVNHLETSEEDDDADDMTGSMPFSTWVMNQDVKKENPLQFRFRAKFYPEDVAEELIQDITLRLFYLQVKNAILTDEIYCPPETSVLLASYAVQARHGDHNKTTHTAGFLANDRLLPQRVIDQHKMSKDEWEQSIMTWWQEHRSMLREDAMMEYLKIAQDLEMYGVNYFEIRNKKGTDLWLGVDALGLNIYEQDDRLTPKIGFPWSEIRNISFSEKKFIIKPIDKKAPDFMFFAPRVRINKRILALCMGNHELYMRRRKPDTIDVQQMKAQAREEKNAKQQEREKLQLALAARERAEKKQQEYEDRLKQMQEDMERSQRDLLEAQDMIRRLEEQLKQLQAAKDELELRQKELQAMLQRLEEAKNMEAVEKLKLEEEIMAKQMEVQRIQDEVNAKDEETKRLQDEVEDARRKQVIAAEAAAALLAASTTPQHHHVAEDENENEEELTNGDAGGDVSRDLDTDEHIKDPIEDRRTLAERNERLHDQLKALKQDLAQSRDETKETANDKIHRENVRQGRDKYKTLREIRKGNTKRRVDQFENM

SEQ ID NO: 161 - DNA, 2004 bp, Drosophila melanogaster
aaagctcacgaaaaacacgcggcaattggataagaaacgaaattgttgatccaacgcgaggaagaagaagaattgtgaagcaagaagaagcgaaaacaaactgcgattgcagcacaaaaacaataaagagttcagacgataatatcctggaaagaaaacatttcgtttcgataagtacgacaagacacgaaacaacaaaatgtctccaaaagcgctaaatgtgcgcgtcacgacaatggacgcggaactggagttcgccattcagtcgacgacgacgggcaagcaattgtttgaccaggtggtgaagacgatcggcctgcgagaggtttggttctttggactccagtacaccgactccaagggcgactccacatggatcaagctgtacaaaaaggtgatgaaccaggacgtgaagaaggagaatcccttgcagtttaggttccgtgccaaattctatcccgaggatgtggccgaggagctgatccaggacattacactgcgtctgttctacctgcaggtgaagaatgccatactgaccgacgagatctattgtccgccagagacatccgtgctgctcgcctcgtacgccgtccaggcgcgtcatggtgaccacaataagaccacccacacagccggctttctggccaacgatcgcctgctgccgcagcgcgtcatcgaccagcacaagatgtccaaggacgagtgggagcagtcgattatgacctggtggcaggagcatcgcagcatgctgcgcgaggatgccatgatggagtatctgaagatcgcccaagacctggagatgtacggcgttaactactttgagatccgcaacaagaagggcacggatctttggctgggcgtagacgcactgggtctgaacatttacgagcaggacgataggttgacgccgaaaattggtttcccatggtccgagattcgcaacatttcgttctcggagaagaagttcatcatcaagccgatcgacaagaaggctccggactttatgttctttgcgccacgtgtccgcatcaacaagcgcattctggccctctgcatgggcaaccacgagctgtacatgcgtcgccgcaagccggacaccatcgatgtgcagcagatgaaggcgcaggcgcgcgaggagaagaatgccaaacagcaggaacgtgagaagctgcagctggcgctggccgcacgcgaacgcgctgaaaagaagcagcaggagtacgaggatcggctaaagcagatgcaggaggacatggagcgttcgcagcgcgatctgcttgaggcgcaggacatgatccgccggctggaggagcagctgaagcagctgcaggccgccaaggatgagctggagctgcgccagaaggagctgcaggcgatgctgcagcgcctcgaggaggccaagaatatggaggccgtcgagaagctcaagctcgaggaggagatcatggccaagcagatggaggtgcagcgcattcaggacgaggtcaacgccaaggatgaggagacaaagcgtctgcaggacgaagtggaagacgcccgacgcaagcaggtcattgcggctgaagccgctgccgctctgctggccgcgtcgacaacgccgcagcatcaccacgtggccgaggatgagaacgagaacgaggaggagctgacgaacggcgatgccggtggcgatgtgtcgcgcgacctggacaccgacgagcatatcaaggaccccatcgaggacagacgcacgctggccgagcgcaacgaacgcttgcacgatcagctcaaggctctgaaacaagatttggcgcagtctcgcgacgagacgaaagagacggcaaacgataagattcatcgcgagaacgttcgccagggacgtgacaagtacaagacgctccgcgagattcgtaagggcaacacaaagcgtcgcgtcgatcagtttgagaacatgtaaaagctatcaaagatcagagatcgatagtgcgcgggaaagagagagggagcggtgagactccagaaaga

SEQ ID NO: 162 - protein, 578 aa, Drosophila melanogaster
MSPKALNVRVTTMDAELEFAIQSTTTGKQLFDQVVKTIGLREVWFFGLQYTDSKGDSTWIKLYKKVMNQDVKKENPLQFRFRAKFYPEDVAEELIQDITLRLFYLQVKNAILTDEIYCPPETSVLLASYAVQARHGDHNKTTHTAGFLANDRLLPQRVIDQHKMSKDEWEQSIMTWWQEHRSMLREDAMMEYLKIAQDLEMYGVNYFEIRNKKGTDLWLGVDALGLNIYEQDDRLTPKIGFPWSEIRNISFSEKKFIIKPIDKKAPDFMFFAPRVRINKRILALCMGNHELYMRRRKPDTIDVQQMKAQAREEKNAKQQEREKLQLALAARERAEKKQQEYEDRLKQMQEDMERSQRDLLEAQDMIRRLEEQLKQLQAAKDELELRQKELQAMLQRLEEAKNMEAVEKLKLEEEIMAKQMEVQRIQDEVNAKDEETKRLQDEVEDARRKQVIAAEAAAALLAASTTPQHHHVAEDENENEEELTNGDAGGDVSRDLDTDEHIKDPIEDRRTLAERNERLHDQLKALKQDLAQSRDETKETANDKIHRENVRQGRDKYKTLREIRKGNTKRRVDQFENM

SEQ ID NO: 163 - DNA, 3879 bp, Homo sapiens
ggcacgaggccagccgaatccaagccgtgtgtactgcgtgctcagcactgcccgacagtcctagctaaacttcgccaactccgctgcctttgccgccaccatgcccaaaacgatcagtgtgcgtgtgaccaccatggatgcagagctggagtttgccatccagcccaacaccaccgggaagcagctatttgaccaggtggtgaaaactattggcttgagggaagtttggttctttggtctgcagtaccaggacactaaaggtttctccacctggctgaaactcaataagaaggtgactgcccaggatgtgcggaaggaaagccccctgctctttaagttccgtgccaagttctaccctgaggatgtgtccgaggaattgattcaggacatcactcagcgcctgttctttctgcaagtgaaagagggcattctcaatgatgatatttactgcccgcctgagaccgctgtgctgctggcctcgtatgctgtccagtctaagtatggcgacttcaataaggaagtgcataagtctggctacctggccggagacaagttgctcccgcagagagtcctggaacagcacaaactcaacaaggaccagtgggaggagcggatccaggtgtggcatgaggaacaccgtggcatgctcagggaggatgctgtcctggaatatctgaagattgctcaagatctggagatgtatggtgtgaactacttcagcatcaagaacaagaaaggctcagagctgtggctgggggtggatgccctgggtctcaacatctatgagcagaatgacagactaactcccaagataggcttcccctggagtgaaatcaggaacatctctttcaatgataagaaatttgtcatcaagcccattgacaaaaaagccccggacttcgtcttctatgctccccggctgcggattaacaagcggatcttggccttgtgcatggggaaccatgaactatacatgcgccgtcgcaagcctgataccattgaggtgcagcagatgaaggcacaggcccgggaggagaagcaccagaagcagatggagcgtgctatgctggaaaatgagaagaagaagcgtgaaatggcagagaaggagaaagagaagattgaacgggagaaggaggagctgatggagaggctgaagcagatcgaggaacagactaagaaggctcagcaagaactggaagaacagacccgtagggctctggaacttgagcaggaacggaagcgtgcccagagcgaggctgaaaagctggccaaggagcgtcaagaagctgaagaggccaaggaggccttgctgcaggcctcccgggaccagaaaaagactcaggaacagctggccttggaaatggcagagctgacagctcgaatctcccagctggagatggcccgacagaagaaggagagtgaggctgtggagtggcagcagaaggcccagatggtacaggaagacttggagaagacccgtgctgagctgaagactgccatgagtacacctcatgtggcagagcctgctgagaatgagcaggatgagcaggatgagaatggggcagaggctagtgctgacctacgggctgatgctatggccaaggaccgcagtgaggaggaacgtaccactgaggcagagaagaatgagcgtgtgcagaagcacctgaaggccctcacttcggagctggccaatgccagagatgagtccaagaagactgccaatgacatgatccatgctgagaacatgcgactgggccgagacaaatacaagaccctgcgccagatccggcagggcaacaccaagcagcgcattgacgaatttgagtctatgtaatgggcacccagcctctagggacccctcctccctttttccttgtccccacactcctacacctaactcacctaactcatactgtgctggagccactaactagagcagccctggagtcatgccaagcatttaatgtagccatgggaccaaacctagccccttagcccccacccacttccctgggcaaatgaatggctcactatggtgccaatggaacctcctttctcttctctgttccattgaatctgtatggctagaatatcctacttctccagcctagaggtactttccacttgattttgcaaatgcccttacacttactgttgtcctatgggagtcaagtgtggagtaggttggaagctagctcccctcctctcccctccactgtcttcttcaggtcctgagattacacggtggagtgtatgcggtctaggaatgagacaggacctagatatcttctccagggatgtcaactgacctaaaatttgccctcccatcccgtttagagttatttaggctttgtaacgattgggggaataaaaagatgttcagtcatttttgtttctacctcccagatcggatctgttgcaaactcagcctcaataagccttgtcgttgactttagggactcaatttctccccagggtggatgggggaaatggtgccttcaagaccttcaccaaacatactagaagggcattggccattctattgtggcaaggctgagtagaagatcctaccccaattccttgtaggagtataggccggtctaaagtgagctctatgggcagatctaccccttacttattattccagatctgcagtcacttcgtgggatctgcccctccctgcttcaatacccaaatcctctccagctataacagtagggatgagtacccaaaagctcagccagccccatcaggactcttgtgaaaagagaggatatgttcacacctagcgtcagtattttccctgctaggggttttaggtctcttcccctctcagagctacttgggccatagctcctgctccacagccatcccagccttggcatctagagcttgatgccagtaggctcaactagggagtgagtgcaaaaagctgagtatggtgagagaagcctgtgccctgatccaagtttactcaaccctctcaggtgaccaaaatccccttctcatcactcccctcaaagaggtgactgggccctgcctctgtttgacaaacctctaacccaggtcttgacaccagctgttctgtcccttggagctgtaaaccagagagctgctgggggattctggcctagtcccttccacacccccaccccttgctctcaacccaggagcatccacctccttctctgtctcatgtgtgctcttcttctttctacagtattatgtactctactgatatctaaatattgatttctgccttccttgctaatgcaccattagaagatattagtcttggggcaggatgattttggcctcattactttaccacccccacacctggaaagcatatactatattacaaaatgacattttgccaaaattattaatataagaagctttcagtattagtgatgtcatctgtcactataggtcatacaatccattcttaaagtacttgttatttgtttttattattactgtttgtcttctccccagggttcagtccctcaaggggccatcctgtcccaccatgcagtgccccctagcttagagcctccctcaattccccctggccaccaccccccactctgtgcctgaccttgaggagtcttgtgtgcattgctgtgaattagctcacttggtgatatgtcctatattggctaaattgaaacctggaattgtggggcaatctattaatagctgccttaaagtcagtaacttacccttagggaggctgggggaaaaggttagattttgtattcaggggttttttgtgtactttttgggtttttaaaaaattgtttttggaggggtttatgctcaatccatgttctatttcagtgccaataaaatttaggtgacttcaaaaaaaaaaaa

SEQ ID NO: 164 - protein, 577 aa, Homo sapiens
MPKTISVRVTTMDAELEFAIQPNTTGKQLFDQVVKTIGLREVWFFGLQYQDTKGFSTWLKLNKKVTAQDVRKESPLLFKFRAKFYPEDVSEELIQDITQRLFFLQVKEGILNDDIYCPPETAVLLASYAVQSKYGDFNKEVHKSGYLAGDKLLPQRVLEQHKLNKDQWEERIQVWHEEHRGMLREDAVLEYLKIAQDLEMYGVNYFSIKNKKGSELWLGVDALGLNIYEQNDRLTPKIGFPWSEIRNISFNDKKFVIKPIDKKAPDFVFYAPRLRINKRILALCMGNHELYMRRRKPDTIEVQQMKAQAREEKHQKQMERAMLENEKKKREMAEKEKEKIEREKEELMERLKQIEEQTKKAQQELEEQTRRALELEQERKRAQSEAEKLAKERQEAEEAKEALLQASRDQKKTQEQLALEMAELTARISQLEMARQKKESEAVEWQQKAQMVQEDLEKTRAELKTAMSTPHVAEPAENEQDEQDENGAEASADLRADAMAKDRSEEERTTEAEKNERVQKHLKALTSELANARDESKKTANDMIHAENMRLGRDKYKTLRQIRQGNTKQRIDEFESM

SEQ ID NO: 165 - DNA, 1362 bp, Drosophila melanogaster
agaaaaccacataaacaagccagcaaacaaggcacacacttgcttgaaaaacgcacaatgaccttgcccacaaacacacacgcatctgcaaacgacggcggcagcggcaacaacaaccacagcaatatcagcagtaacaacagcagcagcagcgacgaagactcagacatgtttggaccaccccgctgctccccgcccatcggctatcaccatcaccgttcccgtgtgcccatgatctcgccaaagctgcggcagcgcgaggagcgcaagcggatcctccagctctgcgcccacaagatggagaggatcaaggactcggaggcgaacctgcggcgcagcgtctgcatcaacaacacctactgccgcctgaatgacgaactgcggcgcgagaagcagatgcgctacctccagaatctgcccagaaccagcgacagcggcgcaagcaccgaactggcgcgtgagaatctcttccagccgaacatggacgacgccaagccggccggcaatagcactagcaataatatcaacgccaacggcaagccttcatcctcttttggcgatgcctttggctcctcaaacggatcatcgtcgggtcgcggcggaatttgctccctggagaatcaaccgcccgagcgtcagcagttggggacgcccgctggtgcctccgctcccgaggcggccaattcggcgcccctttccgtttcgggctcggcatcggaacgcgtgaataaccgaaaacgccacctgtccagctgcaacttggtcaacgatctggaaatactggacagggagctgagcgccatcaatgcacccatgctgctaatcgatccagagattacccaaggagccgaacagctggagaaggccgccttgtccgccagcaggaagagattgaggagcaatagcggcagcgaggacgaaagtgatcgcctggtgcgcgaggctctgtcccagttctacataccgccacagcgcctcatctccgccattgaggagtgtcccctggatgtggttggcttgggtatgggaatgaatgtgaatgtgaatgtgggaggaattagtggaatcggtggcatcggaggagctgcaggcgctggcgtcgaaatgcccggaggcaaacggatgaagctgaatgaccatcaccatctcaatcaccatcaccatttgcaccatcatctggagctggtcgatttcgacatgaaccaaaaccaaaaggatttcgaggtgatcatggacgccttgaggctgggaacggcgacaccgccgagcggcgccagcagcgattcttgcggacaggcggcgatgatgagcgagtcggccagcgtgttccacaatctggtggtcacctcgttggagacatga

SEQ ID NO: 166 - protein, 434 aa, Drosophila melanogaster
MTLPTNTHASANDGGSGNNNHSNISSNNSSSSDEDSDMFGPPRCSPPIGYHHHRSRVPMISPKLRQREERKRILQLCAHKMERIKDSEANLRRSVCINNTYCRLNDELRREKQMRYLQNLPRTSDSGASTELARENLFQPNMDDAKPAGNSTSNNINANGKPSSSFGDAFGSSNGSSSGRGGICSLENQPPERQQLGTPAGASAPEAANSAPLSVSGSASERVNNRKRHLSSCNLVNDLEILDRELSAINAPMLLIDPEITQGAEQLEKAALSASRKRLRSNSGSEDESDRLVREALSQFYIPPQRLISAIEECPLDVVGLGMGMNVNVNVGGISGIGGIGGAAGAGVEMPGGKRMKLNDHHHLNHHHHLHHHLELVDFDMNQNQKDFEVIMDALRLGTATPPSGASSDSCGQAAMMSESASVFHNLVVTSLET

SEQ ID NO: 167 - DNA, 1556 bp, Drosophila melanogaster
aaaactcatcgatgctgcgaaagtgcgatagtatcgaataaacatgagtgtgtgcatgagtgtgggaatttattaaacaaaaacgaaacgcggacaaactatatttatgtaataaacactaagccgcagcgccaacgagtaatgaacagtccacggccaggtcgtactattcaggcgaacgcacctcgcaatcgactgcaatcaaagtgcaatagctcaatcaattgattcgttttgctcaaccaaaaacaaaatctattcccaaatcggtgcgatagttgccaaaatataaaaactacactacgctaaaaaaaaaacaatacactcacacactggcgtacaagacaacaaaagagaagaagaagagcagacgccagatataaaaagcccccaaaagaattggaaataagaccatacccctccttctcccttgaaaagggaccttaaaactaggcgacaccgaataattgaactcaagtaaaaaaccgggaaaagagaaaaacactttcaacaaaatatctagaagccttgttatcgattttgttccgggttttttttgtgtgagtgtgtgttgtgtgaagcgcgcccgcgggtgtgtgggtgagtgtgcgtgtggctctcggcgcgttatcaaaaacaacaacaattcgttgcaaaagaaaaaataaagtagaggaggcggaagaagaagaggaatctgctcgcaccgcggtcaatcgcggatcgtggtcgatttatcgaattaatcgccccgaacaaaaaaaacaccgtacaaggacttgcactatttccaatgatttcgctgctgcaaatgaaattccgtgcgcttttgttgttgctatcaaaagtatggacatgcatttgtttcatgttcaatcgccaagtgcgagcttttatccagtatcaaccggttaaatacgaactcttcccgttgtcacccgtctcgcggcaccgcctgagcctggtgcagcgcaagaccctcgttctggacctggacgaaacgctaatccactcccatcacaatgcgatgccccggaatacggtgaagccgggcacgccgcacgatttcactgtcaaagtgaccatcgatcggaatccagtgcgctttttcgtgcacaagcgaccgcatgtggactacttcctggacgtggtctcgcagtggtacgatctggtggtcttcacggccagcatggagatttacggagcggcggtggcagacaagctggacaacggacgaaacatcctccggaggcgatactacagacagcactgcacgcccgactacggatcctacaccaaagacctgtcggccatctgcagtgacctaaataggatatttatcatcgacaattcgcccggcgcctatcgctgttttcccaacaacgccatacccatcaagagttggttctcggacccgatggacacggcgctgctgtcgctgctgcccatgctggatgcgctgaggttcacgaacgacgtgagatcggtgctgtcgaggaacttgcacctgcaccgcctctggtagcaggtgggccgcctgtcgctagtttagttta

SEQ ID NO: 168 - protein, 243 aa, Drosophila melanogaster
MISLLQMKFRALLLLLSKVWTCICFMFNRQVRAFIQYQPVKYELFPLSPVSRHRLSLVQRKTLVLDLDETLIHSHHNAMPRNTVKPGTPHDFTVKVTIDRNPVRFFVHKRPHVDYFLDVVSQWYDLVVFTASMEIYGAAVADKLDNGRNILRRRYYRQHCTPDYGSYTKDLSAICSDLNRIFIIDNSPGAYRCFPNNAIPIKSWFSDPMDTALLSLLPMLDALRFTNDVRSVLSRNLHLHRLW

SEQ ID NO: 169 - DNA, 1356 bp, Homo sapiens
gccggggccggcggtgccggggtcatcgggatgatgcggacgcagtgtctgctggggctgcgcgcgttcgtggccttcgccgccaagctctggagcttcttcatttaccttttgcggaggcagatccgcacggtaattcagtaccaaactgttcgatatgatatcctccccttatctcctgtgtcccggaatcggctagcccaggtgaagaggaagatcctggtgctggatctggatgagacacttattcactcccaccatgatggggtcctgaggcccacagtccggcctggtacgcctcctgacttcatcctcaaggtggtaatagacaaacatcctgtccggttttttgtacataagaggccccatgtggatttcttcctggaagtggtgagccagtggtacgagctggtggtgtttacagcaagcatggagatctatggctctgctgtggcagataaactggacaatagcagaagcattcttaagaggagatattacagacagcactgcactttggagttgggcagctacatcaaggacctctctgtggtccacagtgacctctccagcattgtgatcctggataactccccaggggcttacaggagccatccagacaatgccatccccatcaaatcctggttcagtgaccccagcgacacagcccttctcaacctgctcccaatgctggatgccctcaggttcaccgctgatgttcgttccgtgctgagccgaaaccttcaccaacatcggctctggtgacagctgctccccctccacctgagttggggtgggggggaaagggagggcgagcccttgggatgccgtctgatgccctgtccaatgtgaggactgcctgggcagggtctgcccctcccacccctctctgccctgggagccctacactccacttggagtctggatggacacatgggccaggggctctgaagcagcctcactcttaacttcgtgttcacactccatggaaaccccagactgggacacaggcggaagcctaggagagccgaatcagtgtttgtgaagaggcaggactggccagagtgacagacatacggtgatccaggaggctcaaagagaagccaagtcagctttgttgtgatttgattttttttaaaaaactcttgtacaaaactgatctaattcttcactcctgctccaagggctgggctgtgggtgggatactgggattttgggccactggattttccctaaatttgtcccccctttactctccctctatttttctctccttagactccctcagacctgtaaccagctttgtgtcttttttccttttctctcttttaaaccatgcattataactttgaaacc

SEQ ID NO: 170 - protein, 244 aa, Homo sapiens
MMRTQCLLGLRAFVAFAAKLWSFFIYLLRRQIRTVIQYQTVRYDILPLSPVSRNRLAQVKRKILVLDLDETLIHSHHDGVLRPTVRPGTPPDFILKVVIDKHPVRFFVHKRPHVDFFLEVVSQWYELVVFTASMEIYGSAVADKLDNSRSILKRRYYRQHCTLELGSYIKDLSVVHSDLSSIVILDNSPGAYRSHPDNAIPIKSWFSDPSDTALLNLLPMLDALRFTADVRSVLSRNLHQHRLW

SEQ ID NO: 171 - DNA, 3020 bp, Drosophila melanogaster
gtcgcgtgttcagttcaccgcgggtaattcagagaatcgctttgtggattggatttttgcctgttttccgcccgatacaaaaaaaaaaaaccaaacgctatataaatagttctgtagtaaaacctgaagcaacacgttttaaaatatacaactactactaacaactgtcacagccaagttacaaaagtgctaaatcccagaaataacctaagagccgacttaaaaccgcgcaaatacataaaaaaaaatcttctccaaagcagaaacaaaaacttgtgaaaaactagaattaaaaaaagattttttaaaaaaaatcagctagtgcaaaataaacgggaagaatttttttttgtgtccctttttttggtgttttttctccgtctttccccttctttgacgcaaaaaaaaaagtgcccaacttgctggcggcacgggaacgggatagaaatagatatagccgaaagcgactggaaagcaaaggaagctaactaaattggattacaatcaattaaatagagacggatacggaaactatgttcagcgagacaggcatataactcaggaacttaagatatatagaaagaaaaaaaaacccagacaacataatcgcaatggccctttaccgctctgatccgtattccataatggacgaccaacttttttcaaatatttcaatattcgatatggataatgatctgtacgatatggacaaactcctttcgtcgtccaccattcagagtgatctcgagaagatcgaggacatggaaagtgtatttcaagactatgacttagaggaggatatgaagccagagatccgcaacatcgactgcatgtggccggcgatgtccagctgtttgaccagcggtaacggtaatggaatagagagcggaaacagtgcagcctcgtcgtacagcgaaaccggtgccgtatccctggcgatggtttccggctctacgaatctctacagcgcgtatcaacgatcgcagacgacagataacacccagtcaaatcaacagcatgtcgtcaacagtgccgagaacatgccggtgatcatcaagaaggagctcgcagatctggactacacggtctgtcagaagcgcctccgtttgagcggcggtgacaagaagtcacagatccaggacgaggtccatttaataccgcccggcggaagtttgctccgcaagcggaacaaccaggacattatccgcaaatcgggcgaattgagcggcagcgatagcataaaataccagagaccagacacacctcacagtcttaccgacgaggtggccgcctcagagtttagacataacgtcgacttgcgtgcctgcgtgatgggcagcaataatatctcgctgaccggcaatgatagcgatgtcaactacattaagcaaatcagcagggagcttcagaataccggcaaggatccgttgccggtgcgttacatcccgccgatcaacgatgtcctcgatgtgctcaaccagcattccaattcgacgggtggccaacagcagttgaaccaacagcaactggacgagcaacaacaggccatcgatatagccactggacgcaacacagtggattctccgccgacgaccggctctgatagtgactccgatgacggtgaacccctcaactttgacctgcgccatcatcgcactagcaaaagcggcagcaatgccagcatcaccaccaacaacaacaacagcaacaacaaaaacaacaaattgaagaacaacagcaacggcatgctgcacatgatgcacatcaccgatcacagctacacgcgctgcaacgatatggtggacgatggtcccaatttggagaccccctcagattccgatgaggaaatcgatgtcgtttcatatacggacaagaagctacccacaaatccctcgtgccacttgatgggcgccctacagttccagatggcccataagatctcgattgatcacatgaagcaaaaaccgcgctacaataacttcaatctgccgtacacaccggccagcagcagtccagtgaaatcggtggccaactcgcgttatccatcaccgtcgagcacaccgtatcagaactgctcctccgcttcgccgtcctactcgccgctatccgtggactcttcaaatgtcagctcgagcagctccagttccagttcgcagtcaagcttcaccacctccagttcgaacaagggacgcaaacgatccagtctgaaggatccaggcttgttgatctcctccagcagcgtttatctgccgggagtcaataacaaagtgacgcatagctccatgatgagcaaaaagagtcgtggcaagaaggtggttggcacctcgtctggcaatacatctccgatatcgtctggccaggatgtggatgccatggatcgtaattggcagcggcgcagtggtggaattgccactagcacaagctccaacagcagtgtccatcggaaggactttgttttgggctttgatgaggccgatacgatcgagaagcgcaatcagcacaatgatatggagcgtcagcgacgcattggactcaagaacctctttgaggctctaaagaaacagattcccacaattagggacaaggagcgggctcccaaggtaaatatcctgcgagaggcggccaagctatgcatccagctgacccaggaggagaaggagcttagtatgcagcgccagcttttgtcgctgcagctgaagcaacgtcaggacactctggccagttaccaaatggagttgaacgaatcgcgctcggttagtggatagtgttgtctcatactatcggcttaaagcggcggcgtagggctaggataacccccaatgtatatgcaagatttgtatatcctcctacttttttttttttgcaatttactttgatttagcttcgatcctttcttgacattaagccctaaatatgatttttttctggagaacttcaatatcagttagtaggttatgtttaacgatttgcttgcgctttttccgcttttttttttgtttttttaccataccataccatac

SEQ ID NO: 172 - protein, 706 aa, Drosophila melanogaster
MDDQLFSNISIFDMDNDLYDMDKLLSSSTIQSDLEKIEDMESVFQDYDLEEDMKPEIRNIDCMWPAMSSCLTSGNGNGIESGNSAASSYSETGAVSLAMVSGSTNLYSAYQRSQTTDNTQSNQQHVVNSAENMPVIIKKELADLDYTVCQKRLRLSGGDKKSQIQDEVHLIPPGGSLLRKRNNQDIIRKSGELSGSDSIKYQRPDTPHSLTDEVAASEFRHNVDLRACVMGSNNISLTGNDSDVNYIKQISRELQNTGKDPLPVRYIPPINDVLDVLNQHSNSTGGQQQLNQQQLDEQQQAIDIATGRNTVDSPPTTGSDSDSDDGEPLNFDLRHHRTSKSGSNASITTNNNNSNNKNNKLKNNSNGMLHMMHITDHSYTRCNDMVDDGPNLETPSDSDEEIDVVSYTDKKLPTNPSCHLMGALQFQMAHKISIDHMKQKPRYNNFNLPYTPASSSPVKSVANSRYPSPSSTPYQNCSSASPSYSPLSVDSSNVSSSSSSSSSQSSFTTSSSNKGRKRSSLKDPGLLISSSSVYLPGVNNKVTHSSMMSKKSRGKKVVGTSSGNTSPISSGQDVDAMDRNWQRRSGGIATSTSSNSSVHRKDFVLGFDEADTIEKRNQHNDMERQRRIGLKNLFEALKKQIPTIRDKERAPKVNILREAAKLCIQLTQEEKELSMQRQLLSLQLKQRQDTLASYQMELNESRSVSG

SEQ ID NO: 173 - DNA, 2121 bp, Homo sapiens
ctgctcgcggccgccaccgccgggccccggccgtccctggctcccctcctgcctcgagaagggcagggcttctcagaggcttggcgggaaaaaagaacggagggagggatcgcgctgagtataaaagccggttttcggggctttatctaactcgctgtagtaattccagcgagaggcagagggagcgagcgggcggccggctagggtggaagagccgggcgagcagagctgcgctgcgggcgtcctgggaagggagatccggagcgaatagggggcttcgcctctggcccagccctcccgcttgatcccccaggccagcggtccgcaacccttgccgcatccacgaaactttgcccatagcagcgggcgggcactttgcactggaacttacaacacccgagcaaggacgcgactctcccgacgcggggaggctattctgcccatttggggacacttccccgccgctgccaggacccgcttctctgaaaggctctccttgcagctgcttagacgctggatttttttcgggtagtggaaaaccagcagcctcccgcgacgatgcccctcaacgttagcttcaccaacaggaactatgacctcgactacgactcggtgcagccgtatttctactgcgacgaggaggagaacttctaccagcagcagcagcagagcgagctgcagcccccggcgcccagcgaggatatctggaagaaattcgagctgctgcccaccccgcccctgtcccctagccgccgctccgggctctgctcgccctcctacgttgcggtcacacccttctcccttcggggagacaacgacggcggtggcgggagcttctccacggccgaccagctggagatggtgaccgagctgctgggaggagacatggtgaaccagagtttcatctgcgacccggacgacgagaccttcatcaaaaacatcatcatccaggactgtatgtggagcggcttctcggccgccgccaagctcgtctcagagaagctggcctcctaccaggctgcgcgcaaagacagcggcagcccgaaccccgcccgcggccacagcgtctgctccacctccagcttgtacctgcaggatctgagcgccgccgcctcagagtgcatcgacccctcggtggtcttcccctaccctctcaacgacagcagctcgcccaagtcctgcgcctcgcaagactccagcgccttctctccgtcctcggattctctgctctcctcgacggagtcctccccgcagggcagccccgagcccctggtgctccatgaggagacaccgcccaccaccagcagcgactctgaggaggaacaagaagatgaggaagaaatcgatgttgtttctgtggaaaagaggcaggctcctggcaaaaggtcagagtctggatcaccttctgctggaggccacagcaaacctcctcacagcccactggtcctcaagaggtgccacgtctccacacatcagcacaactacgcagcgcctccctccactcggaaggactatcctgctgccaagagggtcaagttggacagtgtcagagtcctgagacagatcagcaacaaccgaaaatgcaccagccccaggtcctcggacaccgaggagaatgtcaagaggcgaacacacaacgtcttggagcgccagaggaggaacgagctaaaacggagcttttttgccctgcgtgaccagatcccggagttggaaaacaatgaaaaggcccccaaggtagttatccttaaaaaagccacagcatacatcctgtccgtccaagcagaggagcaaaagctcatttctgaagaggacttgttgcggaaacgacgagaacagttgaaacacaaacttgaacagctacggaactcttgtgcgtaaggaaaagtaaggaaaacgattccttctaacagaaatgtcctgagcaatcacctatgaacttgtttcaaatgcatgatcaaatgcaacctcacaaccttggctgagtcttgagactgaaagatttagccataatgtaaactgcctcaaattggactttgggcataaaagaacttttttatgcttaccatcttttttttttctttaacagatttgtatttaagaattgtttttaaaaaattttaa

SEQ ID NO: 174 - protein, 439 aa, Homo sapiens
MPLNVSFTNRNYDLDYDSVQPYFYCDEEENFYQQQQQSELQPPAPSEDIWKKFELLPTPPLSPSRRSGLCSPSYVAVTPFSLRGDNDGGGGSFSTADQLEMVTELLGGDMVNQSFICDPDDETFIKNIIIQDCMWSGFSAAAKLVSEKLASYQAARKDSGSPNPARGHSVCSTSSLYLQDLSAAASECIDPSVVFPYPLNDSSSPKSCASQDSSAFSPSSDSLLSSTESSPQGSPEPLVLHEETPPTTSSDSEEEQEDEEEIDVVSVEKRQAPGKRSESGSPSAGGHSKPPHSPLVLKRCHVSTHQHNYAAPPSTRKDYPAAKRVKLDSVRVLRQISNNRKCTSPRSSDTEENVKRRTHNVLERQRRNELKRSFFALRDQIPELENNEKAPKVVILKKATAYILSVQAEEQKLISEEDLLRKRREQLKHKLEQLRNSCA

SEQ ID NO: 175 - DNA, 3762 bp, Drosophila melanogaster
tgacagtccgcctctaatttaatttcgtttgtgcacattttgtttgaaagacgcttaagattattgggttttgtttcatgtattgtgccctttgtgctaaaagtgcatccgccattttacgcagagatgtcgacctatttcggggtctatatcccgacctccaaagcgggctgttttgagggatcggtgtcgcagtgcatcggctccatagccgcggtgaacataaagccatccaatccggcgtctggatcggcatcagtagcatcgggatcgccatccggctcggcggcatccgtgcaaacgggcaacgcagacgatggcagtgctgccaccaagtacgaggatcccgactatccaccggactcgccactgtggctgatcttcacggagaaatccaaggcgctggacatcctgcgacactacaaggaggcgcgcctccgcgagtttcccaatctggagcaggcggagagttacgttcagtttgggttcgagagcatcgaggcgctcaagagattttgcaaggcaaagcccgaaagcaagcccattccgataatcagcggtagcggttacaagagctcaccgacctcgacggacaattcgtgctcctcctcgccgacgggtaacggcagtggcttcatcattcccctgggaagcaattcctcaatgtcgaatttactgctcagtgactcaccgacttcctcgccgagcagctccagcaacgtcattgccaatgggcgacagcagcagatgcagcagcaacagcagcagcagccgcagcagccggatgtgtccggagaaggccctcctttccgggcgcccaccaaacaggaactggtagagtttcgcaagcaaatcgaaggtggtcacatagaccgggtgaagaggattatatgggagaatccacgatttttgatcagcagcggtgatacgcccaccagtttgaaggagggctgtcgctataatgccatgcacatctgcgcccaggtcaataaggccaggatcgctcagttgctgttaaagaccatttcggatcgggagttcactcagctttacgttggcaagaagggcagtggcaagatgtgtgctgccctcaacatcagtctcctggactattacctgaacatgccggacaaggggcgcggcgaaacaccgctccactttgccgcaaagaacggtcatgtggccatggtcgaggttctcgtttcctatccggagtgcaaatcgctgcggaatcatgagggcaaggagcccaaggaaatcatctgcctgcgtaatgctaatgctacacatgtgaccatcaagaagctggagctgctcttgtacgatccgcattttgtgcccgtactaagatcccagtcaaatacactgccgccaaaagtgggtcaaccgttctcgcccaaagatccaccgaacctgcaacacaaagcggacgattacgagggcctcagcgtggacctggcaatcagtgcgctggcgggacccatgtcccgcgaaaaggccatgaacttctatcgccgttggaagacaccaccgcgggtcagcaacaatgtgatgtcgccgctggctggttcaccatttagctcgccggtgaaagtaaccccaagcaagtcgatctttgaccgaagtgctggaaactcgagtccagtccactcaggacgcagagtgctctttagtccattggcggaggcgaccagctcaccaaaaccgacgaaaaacgtgcccaatggcaccaatgagtgcgagcacaacaataataatgtgaagccagtgtatccgttggagttcccggcgacacccattcgaaaaatgaaaccggatttattcatggcctatcgcaataacaatagctttgattcgccatctttggccgatgactcccaaatcctggacatgagcctaagccgcagcctgaatgcgtcgctaaatgacagcttccgtgagcggcacatcaagaacactgatatcgagaagggtctggaggtggtcggccgccaactggcacgacaggagcagttagagtggcgcgagtactgggattttctcgattcatttttggacattggtacgaccgaaggcctggcccgtcttgaagcgtatttcctggaaaagaccgaacagcaggcggataaatcagaaacggtctggaactttgcccatctgcatcagtatttcgattcgatggccggcgagcaacagcagcaactccgaaaggataaaaatgaggctgcgggagcaacttcgccatccgccggagtcatgactccgtacacatgcgtagagaagtcgctgcaagtgttcgccaagcgcatcactaaaacgttgatcaacaaaatcggcaacatggtgtccatcaacgacacgctgctctgtgagctcaaaagactgaaatcgctgattgtcagcttcaaggatgatgcccgcttcattagcgtggactttagcaaggtgcattcacgtatcgcccacctggtggccagctatgtgacccactcgcaggaggtcagcgtagccatgcgtctacaattgttgcagatgctccgaagtttgcggcaactgctggccgacgagcgtggtcgagaacagcatttgggctgcgtgtgcgctagtctattgctgatgctggaacaggcgccgacatccgccgtgcatctaccagacactctgaagaccgaggagctatgttgcgccgcctgggagacggagcagtgttgcgcctgtctgtgggacgcaaatctcagccgtaagaccagtcgtcgaaagcgcactaagtcgctgcgggcagctgctgttgttcagtctcagggtcagcttcaggatacttcgggatcgacagggtcgtccgccttgcacgcttcgcttggtgtgggatcgaccagtttgggagcatcgagggtcgtggcgtccgcttcgaaagatgcttggcgccgtcaacaaagcgacgacgaggactacgacagcgatgagcaagtaatctttttcgactgcactaatgttacgctgccttatggaagcagcagcgaggacgaggaaaacttccgtacgccgccgcaaagcttgtcgccaggtatttccatggatttggagccgcgttacgagttgtttatttttggaaacgagccaaccaagcgagatttggatgtgctgaatgccctttccaatgtcgacattgataaggaaacactgccgcatgtctacgcctggaagactgccatggagagctactcctgtgctgaaatgaatctgaacgtcaaggttcaaaagccggagccttggtattctggaaccagttctagccacaacagccaaccattgttgcatcccaagcgtctgcttgccacgccaaagctgaatgccgtggtcagcggcagacgcggatccggaccattgacggcgccagttacaccgcgtctggcgcgaactccgtccgccgccagtattcaagttgcatccgagacgaatggcgagtcggtcggaactgctgtgactccggcatcgccgattttgagttttgccgccttgacggcagcgacgcagtcattccaaacaccattgaacaaggtgcgcggcttgttcagccaatatcgggatcaacggtcctataacgagggggacacgccgctgggcaatcggaactgaaacggaatcggcccggaaacagaaacagaaacagcgactgattgatgaaaggccgactgcatacttacccccctgaatagccggtgtcgtccattgtcccttttaatgttaatcgcatgtatatta

SEQ ID NO: 176 - protein, 1169 aa, Drosophila melanogaster
MSTYFGVYIPTSKAGCFEGSVSQCIGSIAAVNIKPSNPASGSASVASGSPSGSAASVQTGNADDGSAATKYEDPDYPPDSPLWLIFTEKSKALDILRHYKEARLREFPNLEQAESYVQFGFESIEALKRFCKAKPESKPIPIISGSGYKSSPTSTDNSCSSSPTGNGSGFIIPLGSNSSMSNLLLSDSPTSSPSSSSNVIANGRQQQMQQQQQQQPQQPDVSGEGPPFRAPTKQELVEFRKQIEGGHIDRVKRIIWENPRFLISSGDTPTSLKEGCRYNAMHICAQVNKARIAQLLLKTISDREFTQLYVGKKGSGKMCAALNISLLDYYLNMPDKGRGETPLHFAAKNGHVAMVEVLVSYPECKSLRNHEGKEPKEIICLRNANATHVTIKKLELLLYDPHFVPVLRSQSNTLPPKVGQPFSPKDPPNLQHKADDYEGLSVDLAISALAGPMSREKAMNFYRRWKTPPRVSNNVMSPLAGSPFSSPVKVTPSKSIFDRSAGNSSPVHSGRRVLFSPLAEATSSPKPTKNVPNGTNECEHNNNNVKPVYPLEFPATPIRKMKPDLFMAYRNNNSFDSPSLADDSQILDMSLSRSLNASLNDSFRERHIKNTDIEKGLEVVGRQLARQEQLEWREYWDFLDSFLDIGTTEGLARLEAYFLEKTEQQADKSETVWNFAHLHQYFDSMAGEQQQQLRKDKNEAAGATSPSAGVMTPYTCVEKSLQVFAKRITKTLINKIGNMVSINDTLLCELKRLKSLIVSFKDDARFISVDFSKVHSRIAHLVASYVTHSQEVSVAMRLQLLQMLRSLRQLLADERGREQHLGCVCASLLLMLEQAPTSAVHLPDTLKTEELCCAAWETEQCCACLWDANLSRKTSRRKRTKSLRAAAVVQSQGQLQDTSGSTGSSALHASLGVGSTSLGASRVVASASKDAWRRQQSDDEDYDSDEQVIFFDCTNVTLPYGSSSEDEENFRTPPQSLSPGISMDLEPRYELFIFGNEPTKRDLDVLNALSNVDIDKETLPHVYAWKTAMESYSCAEMNLNVKVQKPEPWYSGTSSSHNSQPLLHPKRLLATPKLNAVVSGRRGSGPLTAPVTPRLARTPSAASIQVASETNGESVGTAVTPASPILSFAALTAATQSFQTPLNKVRGLFSQYRDQRSYNEGDTPLGNRN

SEQ ID NO: 177 - DNA, 3790 bp, Drosophila melanogaster
ttgatgttaccctatttttaccgttgccttcgcttgccatcagcggaactttacattttttcacggagttgtgaagaagttgcctgttatttggtgttgatgtcaaaccattttaaccgcttaccttgcagtgcatccgccattttacgcagagatgtcgacctatttcggggtctatatcccgacctccaaagcgggctgttttgagggatcggtgtcgcagtgcatcggctccatagccgcggtgaacataaagccatccaatccggcgtctggatcggcatcagtagcatcgggatcgccatccggctcggcggcatccgtgcaaacgggcaacgcagacgatggcagtgctgccaccaagtacgaggatcccgactatccaccggactcgccactgtggctgatcttcacggagaaatccaaggcgctggacatcctgcgacactacaaggaggcgcgcctccgcgagtttcccaatctggagcaggcggagagttacgttcagtttgggttcgagagcatcgaggcgctcaagagattttgcaaggcaaagcccgaaagcaagcccattccgataatcagcggtagcggttacaagagctcaccgacctcgacggacaattcgtgctcctcctcgccgacgggtaacggcagtggcttcatcattcccctgggaagcaattcctcaatgtcgaatttactgctcagtgactcaccgacttcctcgccgagcagctccagcaacgtcattgccaatgggcgacagcagcagatgcagcagcaacagcagcagcagccgcagcagccggatgtgtccggagaaggccctcctttccgggcgcccaccaaacaggaactggtagagtttcgcaagcaaatcgaaggtggtcacatagaccgggtgaagaggattatatgggagaatccacgatttttgatcagcagcggtgatacgcccaccagtttgaaggagggctgtcgctataatgccatgcacatctgcgcccaggtcaataaggccaggatcgctcagttgctgttaaagaccatttcggatcgggagttcactcagctttacgttggcaagaagggcagtggcaagatgtgtgctgccctcaacatcagtctcctggactattacctgaacatgccggacaaggggcgcggcgaaacaccgctccactttgccgcaaagaacggtcatgtggccatggtcgaggttctcgtttcctatccggagtgcaaatcgctgcggaatcatgagggcaaggagcccaaggaaatcatctgcctgcgtaatgctaatgctacacatgtgaccatcaagaagctggagctgctcttgtacgatccgcattttgtgcccgtactaagatcccagtcaaatacactgccgccaaaagtgggtcaaccgttctcgcccaaagatccaccgaacctgcaacacaaagcggacgattacgagggcctcagcgtggacctggcaatcagtgcgctggcgggacccatgtcccgcgaaaaggccatgaacttctatcgccgttggaagacaccaccgcgggtcagcaacaatgtgatgtcgccgctggctggttcaccatttagctcgccggtgaaagtaaccccaagcaagtcgatctttgaccgaagtgctggaaactcgagtccagtccactcaggacgcagagtgctctttagtccattggcggaggcgaccagctcaccaaaaccgacgaaaaacgtgcccaatggcaccaatgagtgcgagcacaacaataataatgtgaagccagtgtatccgttggagttcccggcgacacccattcgaaaaatgaaaccggatttattcatggcctatcgcaataacaatagctttgattcgccatctttggccgatgactcccaaatcctggacatgagcctaagccgcagcctgaatgcgtcgctaaatgacagcttccgtgagcggcacatcaagaacactgatatcgagaagggtctggaggtggtcggccgccaactggcacgacaggagcagttagagtggcgcgagtactgggattttctcgattcatttttggacattggtacgaccgaaggcctggcccgtcttgaagcgtatttcctggaaaagaccgaacagcaggcggataaatcagaaacggtctggaactttgcccatctgcatcagtatttcgattcgatggccggcgagcaacagcagcaactccgaaaggataaaaatgaggctgcgggagcaacttcgccatccgccggagtcatgactccgtacacatgcgtagagaagtcgctgcaagtgttcgccaagcgcatcactaaaacgttgatcaacaaaatcggcaacatggtgtccatcaacgacacgctgctctgtgagctcaaaagactgaaatcgctgattgtcagcttcaaggatgatgcccgcttcattagcgtggactttagcaaggtgcattcacgtatcgcccacctggtggccagctatgtgacccactcgcaggaggtcagcgtagccatgcgtctacaattgttgcagatgctccgaagtttgcggcaactgctggccgacgagcgtggtcgagaacagcatttgggctgcgtgtgcgctagtctattgctgatgctggaacaggcgccgacatccgccgtgcatctaccagacactctgaagaccgaggagctatgttgcgccgcctgggagacggagcagtgttgcgcctgtctgtgggacgcaaatctcagccgtaagaccagtcgtcgaaagcgcactaagtcgctgcgggcagctgctgttgttcagtctcagggtcagcttcaggatacttcgggatcgacagggtcgtccgccttgcacgcttcgcttggtgtgggatcgaccagtttgggagcatcgagggtcgtggcgtccgcttcgaaagatgcttggcgccgtcaacaaagcgacgacgaggactacgacagcgatgagcaagtaatctttttcgactgcactaatgttacgctgccttatggaagcagcagcgaggacgaggaaaacttccgtacgccgccgcaaagcttgtcgccaggtatttccatggatttggagccgcgttacgagttgtttatttttggaaacgagccaaccaagcgagatttggatgtgctgaatgccctttccaatgtcgacattgataaggaaacactgccgcatgtctacgcctggaagactgccatggagagctactcctgtgctgaaatgaatctgaacgtcaaggttcaaaagccggagccttggtattctggaaccagttctagccacaacagccaaccattgttgcatcccaagcgtctgcttgccacgccaaagctgaatgccgtggtcagcggcagacgcggatccggaccattgacggcgccagttacaccgcgtctggcgcgaactccgtccgccgccagtattcaagttgcatccgagacgaatggcgagtcggtcggaactgctgtgactccggcatcgccgattttgagttttgccgccttgacggcagcgacgcagtcattccaaacaccattgaacaaggtgcgcggcttgttcagccaatatcgggatcaacggtcctataacgagggggacacgccgctgggcaatcggaactgaaacggaatcggcccggaaacagaaacagaaacagcgactgattgatgaaaggccgactgcatacttacccccctgaatagccggtgtcgtccattgtcccttttaatgttaatcgcatgtatatta

SEQ ID NO: 178 - protein, 1169 aa, Drosophila melanogaster; identical to SEQ ID NO: 176

SEQ ID NO: 179 - DNA, 3483 bp, Drosophila melanogaster
aaaacagccagctcatttattaatggtttatccctctcgatgcccacacatcaacattgccatcgccacgacggagcagcggactcgccactgtggctgatcttcacggagaaatccaaggcgctggacatcctgcgacactacaaggaggcgcgcctccgcgagtttcccaatctggagcaggcggagagttacgttcagtttgggttcgagagcatcgaggcgctcaagagattttgcaaggcaaagcccgaaagcaagcccattccgataatcagcggtagcggttacaagagctcaccgacctcgacggacaattcgtgctcctcctcgccgacgggtaacggcagtggcttcatcattcccctgggaagcaattcctcaatgtcgaatttactgctcagtgactcaccgacttcctcgccgagcagctccagcaacgtcattgccaatgggcgacagcagcagatgcagcagcaacagcagcagcagccgcagcagccggatgtgtccggagaaggccctcctttccgggcgcccaccaaacaggaactggtagagtttcgcaagcaaatcgaaggtggtcacatagaccgggtgaagaggattatatgggagaatccacgatttttgatcagcagcggtgatacgcccaccagtttgaaggagggctgtcgctataatgccatgcacatctgcgcccaggtcaataaggccaggatcgctcagttgctgttaaagaccatttcggatcgggagttcactcagctttacgttggcaagaagggcagtggcaagatgtgtgctgccctcaacatcagtctcctggactattacctgaacatgccggacaaggggcgcggcgaaacaccgctccactttgccgcaaagaacggtcatgtggccatggtcgaggttctcgtttcctatccggagtgcaaatcgctgcggaatcatgagggcaaggagcccaaggaaatcatctgcctgcgtaatgctaatgctacacatgtgaccatcaagaagctggagctgctcttgtacgatccgcattttgtgcccgtactaagatcccagtcaaatacactgccgccaaaagtgggtcaaccgttctcgcccaaagatccaccgaacctgcaacacaaagcggacgattacgagggcctcagcgtggacctggcaatcagtgcgctggcgggacccatgtcccgcgaaaaggccatgaacttctatcgccgttggaagacaccaccgcgggtcagcaacaatgtgatgtcgccgctggctggttcaccatttagctcgccggtgaaagtaaccccaagcaagtcgatctttgaccgaagtgctggaaactcgagtccagtccactcaggacgcagagtgctctttagtccattggcggaggcgaccagctcaccaaaaccgacgaaaaacgtgcccaatggcaccaatgagtgcgagcacaacaataataatgtgaagccagtgtatccgttggagttcccggcgacacccattcgaaaaatgaaaccggatttattcatggcctatcgcaataacaatagctttgattcgccatctttggccgatgactcccaaatcctggacatgagcctaagccgcagcctgaatgcgtcgctaaatgacagcttccgtgagcggcacatcaagaacactgatatcgagaagggtctggaggtggtcggccgccaactggcacgacaggagcagttagagtggcgcgagtactgggattttctcgattcatttttggacattggtacgaccgaaggcctggcccgtcttgaagcgtatttcctggaaaagaccgaacagcaggcggataaatcagaaacggtctggaactttgcccatctgcatcagtatttcgattcgatggccggcgagcaacagcagcaactccgaaaggataaaaatgaggctgcgggagcaacttcgccatccgccggagtcatgactccgtacacatgcgtagagaagtcgctgcaagtgttcgccaagcgcatcactaaaacgttgatcaacaaaatcggcaacatggtgtccatcaacgacacgctgctctgtgagctcaaaagactgaaatcgctgattgtcagcttcaaggatgatgcccgcttcattagcgtggactttagcaaggtgcattcacgtatcgcccacctggtggccagctatgtgacccactcgcaggaggtcagcgtagccatgcgtctacaattgttgcagatgctccgaagtttgcggcaactgctggccgacgagcgtggtcgagaacagcatttgggctgcgtgtgcgctagtctattgctgatgctggaacaggcgccgacatccgccgtgcatctaccagacactctgaagaccgaggagctatgttgcgccgcctgggagacggagcagtgttgcgcctgtctgtgggacgcaaatctcagccgtaagaccagtcgtcgaaagcgcactaagtcgctgcgggcagctgctgttgttcagtctcagggtcagcttcaggatacttcgggatcgacagggtcgtccgccttgcacgcttcgcttggtgtgggatcgaccagtttgggagcatcgagggtcgtggcgtccgcttcgaaagatgcttggcgccgtcaacaaagcgacgacgaggactacgacagcgatgagcaagtaatctttttcgactgcactaatgttacgctgccttatggaagcagcagcgaggacgaggaaaacttccgtacgccgccgcaaagcttgtcgccaggtatttccatggatttggagccgcgttacgagttgtttatttttggaaacgagccaaccaagcgagatttggatgtgctgaatgccctttccaatgtcgacattgataaggaaacactgccgcatgtctacgcctggaagactgccatggagagctactcctgtgctgaaatgaatctgaacgtcaaggttcaaaagccggagccttggtattctggaaccagttctagccacaacagccaaccattgttgcatcccaagcgtctgcttgccacgccaaagctgaatgccgtggtcagcggcagacgcggatccggaccattgacggcgccagttacaccgcgtctggcgcgaactccgtccgccgccagtattcaagttgcatccgagacgaatggcgagtcggtcggaactgctgtgactccggcatcgccgattttgagttttgccgccttgacggcagcgacgcagtcattccaaacaccattgaacaaggtgcgcggcttgttcagccaatatcgggatcaacggtcctataacgagggggacacgccgctgggcaatcggaactgaaacggaatcggcccggaaacagaaacagaaacagcgactgattgatgaaaggccgactgcatacttacccccctgaatagccggtgtcgtccattgtcccttttaatgttaatcgcatgtatatta

SEQ ID NO: 180 - protein, 1105 aa, Drosophila melanogaster
MPTHQHCHRHDGAADSPLWLIFTEKSKALDILRHYKEARLREFPNLEQAESYVQFGFESIEALKRFCKAKPESKPIPIISGSGYKSSPTSTDNSCSSSPTGNGSGFIIPLGSNSSMSNLLLSDSPTSSPSSSSNVIANGRQQQMQQQQQQQPQQPDVSGEGPPFRAPTKQELVEFRKQIEGGHIDRVKRIIWENPRFLISSGDTPTSLKEGCRYNAMHICAQVNKARIAQLLLKTISDREFTQLYVGKKGSGKMCAALNISLLDYYLNMPDKGRGETPLHFAAKNGHVAMVEVLVSYPECKSLRNHEGKEPKEIICLRNANATHVTIKKLELLLYDPHFVPVLRSQSNTLPPKVGQPFSPKDPPNLQHKADDYEGLSVDLAISALAGPMSREKAMNFYRRWKTPPRVSNNVMSPLAGSPFSSPVKVTPSKSIFDRSAGNSSPVHSGRRVLFSPLAEATSSPKPTKNVPNGTNECEHNNNNVKPVYPLEFPATPIRKMKPDLFMAYRNNNSFDSPSLADDSQILDMSLSRSLNASLNDSFRERHIKNTDIEKGLEVVGRQLARQEQLEWREYWDFLDSFLDIGTTEGLARLEAYFLEKTEQQADKSETVWNFAHLHQYFDSMAGEQQQQLRKDKNEAAGATSPSAGVMTPYTCVEKSLQVFAKRITKTLINKIGNMVSINDTLLCELKRLKSLIVSFKDDARFISVDFSKVHSRIAHLVASYVTHSQEVSVAMRLQLLQMLRSLRQLLADERGREQHLGCVCASLLLMLEQAPTSAVHLPDTLKTEELCCAAWETEQCCACLWDANLSRKTSRRKRTKSLRAAAVVQSQGQLQDTSGSTGSSALHASLGVGSTSLGASRVVASASKDAWRRQQSDDEDYDSDEQVIFFDCTNVTLPYGSSSEDEENFRTPPQSLSPGISMDLEPRYELFIFGNEPTKRDLDVLNALSNVDIDKETLPHVYAWKTAMESYSCAEMNLNVKVQKPEPWYSGTSSSHNSQPLLHPKRLLATPKLNAVVSGRRGSGPLTAPVTPRLARTPSAASIQVASETNGESVGTAVTPASPILSFAALTAATQSFQTPLNKVRGLFSQYRDQRSYNEGDTPLGNRN

SEQ ID NO: 181 - DNA, 4088 bp, Homo sapiens
gagattttggttacagtgtgggcctgaatcctccagaggaggaagctgtgacatccaagacctgctcggtgccccctagtgacaccgacacctacagagctggagcgactgcgtctaaggagccgcccctgtactatggggtgtgtccagtgtatgaggacgtcccagcgagaaatgaaaggatctatgtttatgaaaataaaaaggaagcattgcaagctgtcaagatgatcaaagggtcccgatttaaagctttttctaccagagaagacgctgagaaatttgctagaggaatttgtgattatttcccttctccaagcaaaacgtccttaccactgtctcctgtgaaaacagctccactctttagcaatgacaggttgaaagatggtttgtgcttgtcggaatcagaaacagtcaacaaagagcgagcgaacagttacaaaaatccccgcacgcaggacctcaccgccaagcttcggaaagctgtggagaagggagaggaggacaccttttctgaccttatctggagcaacccccggtatctgataggctcaggagacaaccccactatcgtgcaggaagggtgcaggtacaacgtgatgcatgttgctgccaaagagaaccaggcttccatctgccagctgactctggacgtcctggagaaccctgacttcatgaggctgatgtaccctgatgacgacgaggccatgctgcagaagcgtatccgttacgtggtggacctgtacctcaacacccccgacaagatgggctatgacacaccgttgcattttgcttgtaagtttggaaatgcagatgtagtcaacgtgctttcgtcacaccatttgattgtaaaaaactcaaggaataaatatgataaaacacctgaagatgtaatttgtgaaagaagcaaaaataaatctgtggaactgaaggagcggatcagagagtatttaaagggccactactacgtgcccctcctgagagcggaagagacttcttctccagtcatcggggagctgtggtccccagaccagacggctgaggcctctcacgtcagccgctatggaggcagccccagagacccggtactgaccctgagagccttcgcagggcccctgagtccagccaaggcagaagattttcgcaagctctggaaaactccacctcgagagaaagcaggcttccttcaccacgtcaagaagtcggacccggaaagaggctttgagagagtgggaagggagctagctcatgagctggggtatccctgggttgaatactgggaatttctgggctgttttgttgatctgtcttcccaggaaggcctgcaaagactagaagaatatctcacacagcaggaaataggcaaaaaggctcaacaagaaacaggagaacgggaagcctcctgccgagataaagccaccacgtctggcagcaattccatttccgtgagggcgtttctagatgaagatgacatgagcttggaagaaataaaaaatcggcaaaatgcagctcgaaataacagcccgcccacagtcggtgcttttggacatacgaggtgcagcgccttccccttggagcaggaggcagacctcatagaagccgccgagccgggaggtccacacagcagcagaaatgggctctgccatcctctgaatcacagcaggaccctggcgggcaagagaccaaaggccccccatggggaggaagcccatctgccacctgtctcggatttgactgttgagtttgataaactgaatttgcaaaatataggacgtagcgtttccaagacaccagatgaaagtacaaaaactaaagatcagatcctgacttcaagaatcaatgcagtagaaagagacttgttagagccttctcccgcagaccaactcgggaatggccacaggaggacagaaagtgaaatgtcagccaggatcgctaaaatgtccttgagtcccagcagccccaggcacgaggatcagctcgaggtcaccagggaaccggccaggcggctcttcctttttggagaggagccatcaaaactcgatcaggatgttttggccgctcttgaatgtgcagacgtcgacccccatcagttcccggccgtgcacagatggaagagtgctgtcctgtgctactcaccctcggacagacagagttggcccagtcccgcggtgaaaggaaggttcaagtctcagctgccagatctcagtggccctcacagctacagtccggggagaaacagcgtggctggaagcaaccccgcaaagccaggcctgggcagtcctgggcgctacagccccgtgcacgggagccagctccgcaggatggcgcgcctggctgagcttgccgccctgtaggcttggcgctgggctctcggtttgttcttcatttttaaagaaggaagggtcatatgtttattgctaaactgtcaaaaaggaatatattctgattaaattattactcctcactttgagggtgtgagaattttagaagatttaaatgttctatataacacttagatttctgatattttggaagaagttagaagttaatgaaagcaaactcagttaccaattttctggaaaatatccatgtggtaatgtagactttttaggtggcaatttctaggtctgaaatatagcagaggaaagggcgctgaggcagttgcaggcaggcagccctgtacttaccctgtactcacctcatccgacagacgctgtggatgaggaggggcttggcggaggcgtgagcaccgatgtccctttgataacctgcactcaccaagatgaactatttgccgccctgtcttttcctgggttggggggtggcatctgatggtggcagagtgcctgttggttcgcccgtgggtctcatggttcagacagagggaggtggacggcagggatcagggagccaggagcgcgcctcagacttgcagcaaccattgtgatttgggttgttcggaatatttaaattactgatcagaagatgaaagtagcttttctcttgggaagtcttgcagcccgtgggagtgataccaggagcaacacagagctcagcagcggcgccaaggtgttccctgtttcctcagcacgtgagccttcaccgcctgcttcattcaggagccagtgcagcagtaatacagtctatacattgttctgttttcaaatttatcctgaggctttgttgagcataaatgattatacgataaaggtatccgttattttggaactcatttcagttgggatctcctgtatgcagagtgttgcatttagaggtttgagtcccatcttggtttcttgccgtgctgactgtagccttcaccttgacttgaatgaaggtctgtggttggaatgtgtgaggagccgctgaggtgttcaggaggtgctgcctggaggtcggtttcttcctgggtgttacgggcaactgctcacacagttgtttctctgtgaacatttccagtgtttaatccaaaatgaaaacccaccaatgcttttgctaacttcagtgccttttataaatcatttttaaatttcctgaacttgctttttgaggatatacagggatattaagtagacgcaggattgtttttgtttgtaaaaattctgaattgaaactttgttttaaaaaaaggcttctttctttcatatgacaagagataggtcaggaatattggaatcaagatttaaatgttaaaattcgattttgttacacagggtgtgttcatttgttttgtagcagacaagatctagatcccagacagaaacaacacatgctattctaaaaagccgcattttaaaaggcaccttggttctcaaaagaaatcagaatatggatattcgtagtgatgatctgttttctctaaaatcttaccatattgtctgtatatggttgtaaattcaaatggaaagtaaaacgttttggccctgattttgtatgtggaccactgctcctgatttcccaggtcttaggccacctttgactgtttctccgtttgtttgtgggcagcgattccagtcccaacggaggcattctcgtgtgtcccggggggttatgtccttcacaaaacacttaatgaaatgaattacttc

SEQ ID NO: 182 - protein, 783 aa, Homo sapiens
DFGYSVGLNPPEEEAVTSKTCSVPPSDTDTYRAGATASKEPPLYYGVCPVYEDVPARNERIYVYENKKEALQAVKMIKGSRFKAFSTREDAEKFARGICDYFPSPSKTSLPLSPVKTAPLFSNDRLKDGLCLSESETVNKERANSYKNPRTQDLTAKLRKAVEKGEEDTFSDLIWSNPRYLIGSGDNPTIVQEGCRYNVMHVAAKENQASICQLTLDVLENPDFMRLMYPDDDEAMLQKRIRYVVDLYLNTPDKMGYDTPLHFACKFGNADVVNVLSSHHLIVKNSRNKYDKTPEDVICERSKNKSVELKERIREYLKGHYYVPLLRAEETSSPVIGELWSPDQTAEASHVSRYGGSPRDPVLTLRAFAGPLSPAKAEDFRKLWKTPPREKAGFLHHVKKSDPERGFERVGRELAHELGYPWVEYWEFLGCFVDLSSQEGLQRLEEYLTQQEIGKKAQQETGEREASCRDKATTSGSNSISVRAFLDEDDMSLEEIKNRQNAARNNSPPTVGAFGHTRCSAFPLEQEADLIEAAEPGGPHSSRNGLCHPLNHSRTLAGKRPKAPHGEEAHLPPVSDLTVEFDKLNLQNIGRSVSKTPDESTKTKDQILTSRINAVERDLLEPSPADQLGNGHRRTESEMSARIAKMSLSPSSPRHEDQLEVTREPARRLFLFGEEPSKLDQDVLAALECADVDPHQFPAVHRWKSAVLCYSPSDRQSWPSPAVKGRFKSQLPDLSGPHSYSPGRNSVAGSNPAKPGLGSPGRYSPVHGSQLRRMARLAELAAL

SEQ ID NO: 183 - DNA, 972 bp, Drosophila melanogaster
aacgaaacagccggccgtcaaaatttttcctaacatttcactattttcacgcttgtgttacggcaataaagtcgattgataagcacggaaagatctggctgcgggtctggtgaaatccacagaacacacggaacccgtatagtagtgccgccctttattggttttatctcaagtacgacgcgataagatttcgagcaactcgatcgcggatcttcggaaaaaaaaaacatgaactccatcctgataaccggctgcaatcgaggattgggtctgggcctggtcaaggcgctgctcaatcttccccagccgccgcagcatctatttaccacctgccggaatcgcgagcaggcaaaggagctggaggatctagccaagaaccactcgaacatacacatacttgagattgatttgagaaatttcgatgcctatgacaagctagtcgccgacatcgagggcgtgaccaaggaccaaggcctcaatgtgctcttcaacaatgccggcatagcgcccaaatcggccaggataacggccgttcgatcgcaggagctgctcgacaccttgcagaccaacacggttgtgcccatcatgctggccaaggcgtgtctgccgctccttaagaaggcagccaaagcgaacgaatcccagccgatgggcgtgggccgtgccgccattattaacatgtcctcgatccttggctccatccagggcaacacggacggcggaatgtacgcctatcgcacctctaagtcggccttgaatgcggccaccaagtcgttgagcgtggatctgtatccgcaacgcatcatgtgcgtcagtctgcatcctggctgggtgaaaaccgacatgggtggctccagtgcccccttggacgtgcccaccagcacgggacaaattgtgcagaccatcagcaagctgggcgagaaacagaacggcggttttgtcaactacgacggcactccgctggcctggtaa

SEQ ID NO: 184 - protein, 247 aa, Drosophila melanogaster
MNSILITGCNRGLGLGLVKALLNLPQPPQHLFTTCRNREQAKELEDLAKNHSNIHILEIDLRNFDAYDKLVADIEGVTKDQGLNVLFNNAGIAPKSARITAVRSQELLDTLQTNTVVPIMLAKACLPLLKKAAKANESQPMGVGRAAIINMSSILGSIQGNTDGGMYAYRTSKSALNAATKSLSVDLYPQRIMCVSLHPGWVKTDMGGSSAPLDVPTSTGQIVQTISKLGEKQNGGFVNYDGTPLAW

SEQ ID NO: 185 - DNA, 2044 bp, Drosophila melanogaster
cgacaagccaatcgacgtctccctttcgcacgctcgtacgaaagtacaaaagctattgcaaaagttggctccgcttattcgtttcgtgctttcgcgagtgccgagagccgctacaatacacgcttagcagtttttacatttccgcttcgactacaacaacattcactacccgccgttgatccttgttttctgtctgatttacgtggagcacctaccaacaagcaacaaaataatggcgcccgtgcaaggatcctacgactacgaccttattgtgattggaggcggctcagctggcctggcctgcgccaaggaggcagtcctcaatggagcccgtgtggcctgtctggatttcgttaagcccacgcccactctgggcaccaagtggggcgttggcggcacctgcgtgaacgtgggctgcattcccaagaagctgatgcaccaggcctcccttctgggcgaggctgtccatgaggcggccgcctacggctggaacgtggacgaaaagatcaagccagactggcacaagctggtgcagtccgtacagaaccacatcaagtccgtcaactgggtgacccgtgtggatctgcgcgacaagaaagtggagtacatcaatggactgggctccttcgtggactcgcacacactgctggccaagctgaagagcggcgagcgcacaatcaccgcccagaccttcgtcattgccgttggcggccgaccacgttatccggatattcccggtgctgtcgagtatggcatcaccagcgatgatctgttcagtttggaccgcgagcccggcaagaccctggtggtgggagctggctacattggcttggagtgcgctggattcctgaagggtctcggctacgagcccactgtgatggtgcgttctattgtgctgcgtggcttcgaccagcagatggccgagctggtggcagcctcgatggaggagcgtggcattcccttcctccgcaagacggtgccgctgtccgtggaaaagcaggatgatggcaagctgctcgtgaagtacaagaacgtggagaccggcgaggaggccgaggatgtttacgacaccgttctgtgggccatcggccgcaagggtctggtggacgatctgaacctgcccaatgccggcgtgactgtgcagaaggacaagattccagtggactcccaggaggctaccaatgtggcaaacatctacgctgtcggcgatatcatctatggcaagccagagctgacgcccgtcgccgttttggctggccgtttgctggcccgccgcctgtacggaggatctacccagcgcatggactacaaggatgtggccaccaccgttttcacgcccctggagtacgcctgcgtcggcctgagcgaggaggatgccgtcaagcagttcggagccgatgagatcgaggtgttccacggctactacaagcccacggagttcttcattccccagaagagcgtgcgctactgctacttgaaggctgtggccgagcgccatggtgaccagcgcgtctatggactgcactatattggcccggtggccggtgaggttatccagggattcgctgccgctttgaagtctggcctgactattaacacgctgatcaacaccgtgggcatccatcccactaccgccgaagaattcacccggctggccatcaccaagcgctccggactggaccccacgccggccagctgctgcagctaaagcgggaacgcagctcagccgcctgggacgtgtcgaagccgcttgctccacccgaaatcccgtagatgaatggttgttgtcgcggcccagcgatcgatgagttcaatagttccgtttcgtttccacaattaacacccaacacaatagctctgcgcaagggaggggcactgggcagcgatggcgggtggaacgacaccagtggaactacccgcgcgaccagcccaacccacgactgctgcgccgccgacatgcactcaaaattttgaatttgtttgaacctatgaaattaactatgaaatcccctaaatgtacggttgaagaatataatttttcacc

SEQ ID NO: 186 - protein, 491 aa, Drosophila melanogaster
MAPVQGSYDYDLIVIGGGSAGLACAKEAVLNGARVACLDFVKPTPTLGTKWGVGGTCVNVGCIPKKLMHQASLLGEAVHEAAAYGWNVDEKIKPDWHKLVQSVQNHIKSVNWVTRVDLRDKKVEYINGLGSFVDSHTLLAKLKSGERTITAQTFVIAVGGRPRYPDIPGAVEYGITSDDLFSLDREPGKTLVVGAGYIGLECAGFLKGLGYEPTVMVRSIVLRGFDQQMAELVAASMEERGIPFLRKTVPLSVEKQDDGKLLVKYKNVETGEEAEDVYDTVLWAIGRKGLVDDLNLPNAGVTVQKDKIPVDSQEATNVANIYAVGDIIYGKPELTPVAVLAGRLLARRLYGGSTQRMDYKDVATTVFTPLEYACVGLSEEDAVKQFGADEIEVFHGYYKPTEFFIPQKSVRYCYLKAVAERHGDQRVYGLHYIGPVAGEVIQGFAAALKSGLTINTLINTVGIHPTTAEEFTRLAITKRSGLDPTPASCCS

SEQ ID NO: 187 - DNA, 2264 bp, Drosophila melanogaster
cccggccgaaccagcgaacgtgtttgtgttgtgtgttccgccgtcatttttctgcacccttttcgcgaatagtttcgtttcgcctccagctggtagagtgaaacgccaaacgttgaagaaggggaaaggccaacaagatgaacttgtgcaattcgagattctccgttacgttcgtgcggcagtgctcgacgattttaacgtctccttcggctggcattatacaaaacagaggctcactgacaacaaaggttccccattggatttccagtagtctcagctgtgcccatcacacgtttcagcgaactatgaacttgacgggacagcgaggatcacgcgacagtactggagctaccggtgggaatgctccagccggatccggtgccggcgcaccaccacccttccagcatccacattgcgacagggcggccatgtacgcgcaaccggtgcgaaagatgagcaccaaaggaggatcctacgactacgaccttattgtgattggaggcggctcagctggcctggcctgcgccaaggaggcagtcctcaatggagcccgtgtggcctgtctggatttcgttaagcccacgcccactctgggcaccaagtggggcgttggcggcacctgcgtgaacgtgggctgcattcccaagaagctgatgcaccaggcctcccttctgggcgaggctgtccatgaggcggccgcctacggctggaacgtggacgaaaagatcaagccagactggcacaagctggtgcagtccgtacagaaccacatcaagtccgtcaactgggtgacccgtgtggatctgcgcgacaagaaagtggagtacatcaatggactgggctccttcgtggactcgcacacactgctggccaagctgaagagcggcgagcgcacaatcaccgcccagaccttcgtcattgccgttggcggccgaccacgttatccggatattcccggtgctgtcgagtatggcatcaccagcgatgatctgttcagtttggaccgcgagcccggcaagaccctggtggtgggagctggctacattggcttggagtgcgctggattcctgaagggtctcggctacgagcccactgtgatggtgcgttctattgtgctgcgtggcttcgaccagcagatggccgagctggtggcagcctcgatggaggagcgtggcattcccttcctccgcaagacggtgccgctgtccgtggaaaagcaggatgatggcaagctgctcgtgaagtacaagaacgtggagaccggcgaggaggccgaggatgtttacgacaccgttctgtgggccatcggccgcaagggtctggtggacgatctgaacctgcccaatgccggcgtgactgtgcagaaggacaagattccagtggactcccaggaggctaccaatgtggcaaacatctacgctgtcggcgatatcatctatggcaagccagagctgacgcccgtcgccgttttggctggccgtttgctggcccgccgcctgtacggaggatctacccagcgcatggactacaaggatgtggccaccaccgttttcacgcccctggagtacgcctgcgtcggcctgagcgaggaggatgccgtcaagcagttcggagccgatgagatcgaggtgttccacggctactacaagcccacggagttcttcattccccagaagagcgtgcgctactgctacttgaaggctgtggccgagcgccatggtgaccagcgcgtctatggactgcactatattggcccggtggccggtgaggttatccagggattcgctgccgctttgaagtctggcctgactattaacacgctgatcaacaccgtgggcatccatcccactaccgccgaagaattcacccggctggccatcaccaagcgctccggactggaccccacgccggccagctgctgcagctaaagcgggaacgcagctcagccgcctgggacgtgtcgaagccgcttgctccacccgaaatcccgtagatgaatggttgttgtcgcggcccagcgatcgatgagttcaatagttccgtttcgtttccacaattaacacccaacacaatagctctgcgcaagggaggggcactgggcagcgatggcgggtggaacgacaccagtggaactacccgcgcgaccagcccaacccacgactgctgcgccgccgacatgcactcaaaattttgaatttgtttgaacctatgaaattaactatgaaatcccctaaatgtacggttgaagaatataatttttcacc

SEQ ID NO: 188 - protein, 491 aa, Drosophila melanogaster
MSTKGGSYDYDLIVIGGGSAGLACAKEAVLNGARVACLDFVKPTPTLGTKWGVGGTCVNVGCIPKKLMHQASLLGEAVHEAAAYGWNVDEKIKPDWHKLVQSVQNHIKSVNWVTRVDLRDKKVEYINGLGSFVDSHTLLAKLKSGERTITAQTFVIAVGGRPRYPDIPGAVEYGITSDDLFSLDREPGKTLVVGAGYIGLECAGFLKGLGYEPTVMVRSIVLRGFDQQMAELVAASMEERGIPFLRKTVPLSVEKQDDGKLLVKYKNVETGEEAEDVYDTVLWAIGRKGLVDDLNLPNAGVTVQKDKIPVDSQEATNVANIYAVGDIIYGKPELTPVAVLAGRLLARRLYGGSTQRMDYKDVATTVFTPLEYACVGLSEEDAVKQFGADEIEVFHGYYKPTEFFIPQKSVRYCYLKAVAERHGDQRVYGLHYIGPVAGEVIQGFAAALKSGLTINTLINTVGIHPTTAEEFTRLAITKRSGLDPTPASCCS

SEQ ID NO: 189 - DNA, 1128 bp, Homo sapiens
taagcttcgggcgctgtagtacctgccagctttcgccacaggaggctgccacctgtaggtcacttgggctccagctatgtggctgcctcttctgctgggtgccttactctgggcagtgctgtggttgctcagggaccggcagagcctgcccgccagcaatgcctttgtcttcatcaccggctgtgactcaggctttgggcgccttctggcactgcagctggaccagagaggcttccgagtcctggccagctgcctgaccccctccggggccgaggacctgcagcgggtggcctcctcccgcctccacaccaccctgttggatatcactgatccccagagcgtccagcaggcagccaagtgggtggagatgcacgttaaggaagcagggctttttggtctggtgaataatgctggtgtggctggtatcatcggacccacaccatggctgacccgggacgatttccagcgggtgctgaatgtgaacacaatgggtcccatcggggtcacccttgccctgctgcctctgctgcagcaagcccggggccgggtgatcaacatcaccagcgtcctgggtcgcctggcagccaatggtgggggctactgtgtctccaaatttggcctggaggccttctctgacagcctgaggcgggatgtagctcattttgggatacgagtctccatcgtggagcctggcttcttccgaacccctgtgaccaacctggagagtctggagaaaaccctgcaggcctgctgggcacggctgcctcctgccacacaggcccactatgggggggccttcctcaccaagtacctgaaaatgcaacagcgcatcatgaacctgatctgtgacccggacctaaccaaggtgagccgatgcctggagcatgccctgactgctcgacacccccgaacccgctacagcccaggttgggatgccaagctgctctggctgcctgcctcctacctgccagccagcctggtggatgctgtgctcacctgggtccttcccaagcctgcccaagcagtctactgaatccagccttccagcaagagattgtttttcaaggacaaggactttgatttatttctgcccccaccctggtactgcctggtgcctgccacaaaata

SEQ ID NO: 190 - protein, 318 aa, Homo sapiens
MWLPLLLGALLWAVLWLLRDRQSLPASNAFVFITGCDSGFGRLLALQLDQRGFRVLASCLTPSGAEDLQRVASSRLHTTLLDITDPQSVQQAAKWVEMHVKEAGLFGLVNNAGVAGIIGPTPWLTRDDFQRVLNVNTMGPIGVTLALLPLLQQARGRVINITSVLGRLAANGGGYCVSKFGLEAFSDSLRRDVAHFGIRVSIVEPGFFRTPVTNLESLEKTLQACWARLPPATQAHYGGAFLTKYLKMQQRIMNLICDPDLTKVSRCLEHALTARHPRTRYSPGWDAKLLWLPASYLPASLVDAVLTWVLPKPAQAVY

SEQ ID NO: 191 - DNA, 2025 bp, Homo sapiens
ccggacctcaggcccagttcagtgtacttcccctctctacttcctccctccagtcccttctccatccctcccttttttggctgccccttgcctgccttcctcgccagtagcttgcagagtagacacgatgacaccttttgcaggctaaaaaggctgagagtggcactatgtgcagtgagccaccatggaggaccaagcaggtcagcgggactatgatctcctggtggtcggcgggggatctggtggcctggcttgtgccaaggaggccgcccagctgggaaggaaggtggccgtggtggactacgtggaaccttctccccaaggcacccggtggggcctcggcggcacctgcgtcaacgtgggctgcatccccaagaagctgatgcaccaggcggcactgctgggaggcctgatccaagatgcccccaactatggctgggaggtggcccagcccgtgccgcatgactggaggaagatggcagaagctgttcaaaatcacgtgaaatccttgaactggggccaccgtgtccagcttcaggacagaaaagtcaagtactttaacatcaaagccagctttgttgacgagcacacggtttgcggcgttgccaaaggtgggaaagagattctgctgtcagccgatcacatcatcattgctactggagggcggccgagataccccacgcacatcgaaggtgccttggaatatggaatcacaagtgatgacatcttctggctgaaggaatcccctggaaaaacgttggtggtcggggccagctatgtggccctggagtgtgctggcttcctcaccgggattgggctggacaccaccatcatgatgcgcagcatccccctccgcggcttcgaccagcaaatgtcctccatggtcatagagcacatggcatctcatggcacccggttcctgaggggctgtgccccctcgcgggtcaggaggctccctgatggccagctgcaggtcacctgggaggacagcaccaccggcaaggaggacacgggcacctttgacaccgtcctgtgggccataggtcgagtcccagacaccagaagtctgaatttggagaaggctggggtagatactagccccgacactcagaagatcctggtggactcccgggaagccacctctgtgccccacatctacgccattggtgacgtggtggaggggcggcctgagctgacacccatagcgatcatggccgggaggctcctggtgcagcggctcttcggcgggtcctcagatctgatggactacgacaatgttcccacgaccgtcttcaccccgctggagtatggctgtgtggggctgtccgaggaggaggcagtggctcgccacgggcaggagcatgttgaggtctatcacgcccattataaaccactggagttcacggtggctggacgagatgcatcccagtgttatgtaaagatggtgtgcctgagggagcccccacagctggtgctgggcctgcatttccttggccccaacgcaggcgaagttactcaaggatttgctctggggatcaagtgtggggcttcctatgcgcaggtgatgcggaccgtgggtatccatcccacatgctctgaggaggtagtcaagctgcgcatctccaagcgctcaggcctggaccccacggtgacaggctgctgagggtaagcgccatccctgcaggccagggcacacggtgcgcccgccgccagctcctcggaggccagacccaggatggctgcaggccaggtttggggggcctcaaccctctcctggagcgcctgtgagatggtcagcgtggagcgcaagtgctggacaggtggcccgtgtgccccacagggatggctcaggggactgtccacctcacccctgcacctctcagcctctgccgccgggcacccccccccaggctcctggtgccagatgatgacgacctgggtggaaacctaccctgtgggcacccatgtccgagccccctggcatttctgcaatgcaaataaagagggtactttttctgaagtgtg

SEQ ID NO: 192 - protein, 494 aa, Homo sapiens
  MISC_FEATURE (493)..(493): Xaa is uncertain
MEDQAGQRDYDLLVVGGGSGGLACAKEAAQLGRKVAVVDYVEPSPQGTRWGLGGTCVNVGCIPKKLMHQAALLGGLIQDAPNYGWEVAQPVPHDWRKMAEAVQNHVKSLNWGHRVQLQDRKVKYFNIKASFVDEHTVCGVAKGGKEILLSADHIIIATGGRPRYPTHIEGALEYGITSDDIFWLKESPGKTLVVGASYVALECAGFLTGIGLDTTIMMRSIPLRGFDQQMSSMVIEHMASHGTRFLRGCAPSRVRRLPDGQLQVTWEDSTTGKEDTGTFDTVLWAIGRVPDTRSLNLEKAGVDTSPDTQKILVDSREATSVPHIYAIGDVVEGRPELTPIAIMAGRLLVQRLFGGSSDLMDYDNVPTTVFTPLEYGCVGLSEEEAVARHGQEHVEVYHAHYKPLEFTVAGRDASQCYVKMVCLREPPQLVLGLHFLGPNAGEVTQGFALGIKCGASYAQVMRTVGIHPTCSEEVVKLRISKRSGLDPTVTGCXG

SEQ ID NO: 193 - DNA, 2645 bp, Drosophila melanogaster
ctttggcttgtttgcttgaaaaaacgtaactttttttgttgtaatgaaggaagcagcacgggcagtagaccaactcgaaatcgcgcattgccaacacgtaacgtaccagcccgtgtaataacagaagaaaccccgagccgcaacaacaacccccgaaaagcggtagttgtaagagttttcccaaagtggcagcggcaattacacggcgagaaacgagttcgcgtcgcgtccagctgtttgaaaatcaaaattaaccgtttttagcgcgtgaaacaagacgtttagaaccgtgttcaaaatccctcgtacataaattgtgtgtacatttatatatatatatattttctacgccacgttaaccagactttttaagttttaaattaaaactaaagacgtattatttttttttttttgagtgtttatatttttttttttgcaagttttgtttggttacatttgagtttgtgttgagtttttgccagccaaaggcgcttaagatgtttagtcccgagtacgagaagcgcatcctgaagcactacagtcctgtggcacggaatctgttcaacaacttcgagtcgtccactacgcccacatctctcgaccgcttcataccctgcagagcgtacaacaactggcagacgaactttgcgtcaatcaacaagtccaatgacaactcgccgcagacgagtaagaagcagcgggactgcggggaaacggcacgcgatagtctcgcctactcctgcctactgaagaacgagctcctcggatcggcaatcgacgacgtgaagaccgccggcgaggagcggaatgagaatgcctacacgccggccgcaaagcggagtctcttcaagtaccagtcacccaccaagcaggactacaatggcgagtgtccgtactcgttgtcacccgtcagcgccaaaagtcagaagctgttgcgatcgccgcgcaaggctacgcgcaaaatctctcgcattcccttcaaggtgctagacgcgcccgagttgcaggacgacttctatctgaacctggtcgactggtcgtcgcagaacgtactggctgtaggcctgggcagctgtgtctatctgtggagcgcgtgcaccagtcaggttacccgcctgtgtgatctcagtccggatgcgaatacggtgacctcggtgtcgtggaacgagcgtggcaacaccgtggccgtgggcacacatcacggctacgtgaccgtctgggatgtggcggccaataagcagatcaacaaactgaatggccattcggcgcgtgtgggcgccttggcatggaacagtgacatcctgtcgagcgggtcgcgagaccgttggatcatacagcgggatacgagaacgccgcaactgcaatcggagcgcagattggccggacatcggcaggaggtgtgcggactgaaatggtcaccggataatcaatacttggccagtggcggcaacgataatcggttgtatgtgtggaatcagcattccgtgaatcccgtacaatcatacacggagcatatggcggctgtaaaggcgatcgcgtggtcgccgcatcaccacggactcctggccagcggcggtggaacggcggataggtgtatccgtttctggaatacgctgacgggccagcccatgcagtgcgtggacacgggctcgcaggtttgcaatctggcctggtccaagcactcctcggagctggtctccacgcacggctactcgcagaaccagatactcgtgtggaaatatccctccctgacgcaagtggccaagctgacgggccattcgtatcgtgtgctctatctggcgctgagtcccgatggtgaggctattgttacgggcgccggcgacgagacgctgcgattttggaacgtattcagcaaggcgcgcagtcagaaggagaacaagtccgttctgaatctgtttgccaatatcagataaggacaataactccaagcgagcgaagactgagcgagcgccaaaggcaaacacaacacaacacaaaacaaaacaaaacaaagcaaagtataatataaataaaatggatacttgaaaccgaaaaacaaagccaaccaaccaatcagcaaaaaccaagctgaagctaacaaactaatcgagcctatatgctatatatatacaaacgattcttgttcagcagtcgttttgtaaattgttgtgtgaccccacagcagcaatagattaaataaatttaagttaagcaatctgtatagaacggtaattagcaacatttacgtaggtaaacacatgcaatttatgaaggaataacatcaagagagatggctgaaacaagaactgaaaatgaaactaagtctatggaaattgtaagtaattggaaaatcaacaacaccacactcacacactatctttaatcgacattttttgttgctgcttttttaaatgtattgttttttttttgtggtacacctacactacacctaagaaaattggatacccctacatatacatttatacgtttatatatatatatttttttgctagcctctaagtaactaactttatttcaagcaaacatttatacacatatttcgctcactagaaacactcatacccccgaaaacacaatgtatattaaataaacttatacaatttcaaaatgtgccccaaaaagta

SEQ ID NO: 194 - protein, 478 aa, Drosophila melanogaster
MFSPEYEKRILKHYSPVARNLFNNFESSTTPTSLDRFIPCRAYNNWQTNFASINKSNDNSPQTSKKQRDCGETARDSLAYSCLLKNELLGSAIDDVKTAGEERNENAYTPAAKRSLFKYQSPTKQDYNGECPYSLSPVSAKSQKLLRSPRKATRKISRIPFKVLDAPELQDDFYLNLVDWSSQNVLAVGLGSCVYLWSACTSQVTRLCDLSPDANTVTSVSWNERGNTVAVGTHHGYVTVWDVAANKQINKLNGHSARVGALAWNSDILSSGSRDRWIIQRDTRTPQLQSERRLAGHRQEVCGLKWSPDNQYLASGGNDNRLYVWNQHSVNPVQSYTEHMAAVKAIAWSPHHHGLLASGGGTADRCIRFWNTLTGQPMQCVDTGSQVCNLAWSKHSSELVSTHGYSQNQILVWKYPSLTQVAKLTGHSYRVLYLALSPDGEAIVTGAGDETLRFWNVFSKARSQKENKSVLNLFANIR

SEQ ID NO: 195 - DNA, 2978 bp, Homo sapiens
ggccgcggccgggcctgcgggagctgcggaggccggaggcgggcgctgtgcggtgccaggagaggcggggtcggcgggagccagcgagccacgggagcgagccaggctaaccttgccgcgggccgagccctgcctcgccatggaccaggactatgagcggcgcctgcttcgccagatcgtcatccagaatgagaacacgatgccacgcgtcacagagatgcggcggaccctgacgcctgccagctccccagtgtcctcgcccagcaagcacggagaccgcttcatcccctccagagccggagccaactggagcgtgaacttccacaggattaacgagaatgagaagtctcccagtcagaaccggaaagccaaggacgccacctcagacaacggcaaagacggcctggcctactctgccctgctcaagaatgagctgctgggtgccggcatcgagaaggtgcaggacccgcagactgaggaccgcaggctgcagccctccacgcctgagaagaagggtctgttcacgtattcccttagcaccaagcgctccagccccgatgacggcaacgatgtgtctccctactccctgtctcccgtcagcaacaagagccagaagctgctccggtccccccggaaacccacccgcaagatctccaagatccccttcaaggtgctggacgcgcccgagctgcaggacgacttctacctcaatctggtggactggtcgtccctcaatgtgctcagcgtggggctaggcacctgcgtgtacctgtggagtgcctgtaccagccaggtgacgcggctctgtgacctctcagtggaaggggactcagtgacctccgtgggctggtctgagcgggggaacctggtggcggtgggcacacacaagggcttcgtgcagatctgggacgcagccgcagggaagaagctgtccatgttggagggccacacggcacgcgtcggggcgctggcctggaatgctgagcagctgtcgtccgggagccgcgaccgcatgatcctgcagagggacatccgcaccccgccactgcagtcggagcggcggctgcagggccaccggcaggaggtgtgcgggctcaagtggtccacagaccaccagctcctcgcctcggggggcaacgacaacaagctgctggtctggaatcactcgagcctgagccccgtgcagcagtacacggagcacctggcggccgtgaaggccatcgcctggtccccacatcagcacgggctgctggcctcggggggcggcacagctgaccgctgtatccgcttctggaacacgctgacaggacaaccactgcagtgtatcgacacgggctcccaagtgtgcaatctggcctggtccaagcacgccaacgagctggtgagcacgcacggctactcacagaaccagatccttgtctggaagtacccctccctgacccaggtggccaagctgaccgggcactcctaccgcgtgctgtacctggcaatgtcccctgatggggaggccatcgtcactggtgctggagacgagaccctgaggttctggaacgtctttagcaaaacccgttcgacaaaggagtctgtgtctgtgctcaacctcttcaccaggatccggtaaacctgccgggcaggaccgtgccacaccagctgtccagagtcggaggaccccagctcctcagcttgcatggactctgccttcccagcgcttgtcccccgaggaaggcggctgggcgggcggggagctgggcctggaggatcctggagtctcattaaatgcctgattgtgaaccatgtccaccagtatctggggtgggcacgtggtcggggaccctcagcagcaggggctctgtctcccttcccaaagggcgagaaccacattggacggtcccggctcagaccgtctgtactcagagcgacggatgccccctgggaccctcactgcctccgtctgttcatcacctgcccaccggagccgcatgctcttcctggaactgcccacgtctgcacagaacagaccaccagacgccagggctgattggtgggggcctgagaccccggttgcccattcatggctgcaccccaccatgtcaaacccaagaccagccccaaggccagaccaaggcatgtaggcctgggcaggtggctcggggccactggcggagccagcctgtggatccaagagacagtccccacctgggcttcacggcatccttgcagccacctctgctgtcactgctcgaagcagcagtctctctggaagcatctgtgtcatggccatcgcccggcggtcagtgggcttcagatgggcctgtgcatcctggccaagcgtcaccctcacactggaggaggatgtctgctctggacttatcaccccaggagaactgaacccggacctgctcactgccctggctggagaggagcacaacagatgccacgtcttcgtgcattcgccaacacgtgccctcacagggccagcgtcctccttccctgcgcaagacttgcgtcccccatgcctgctgggtggctgggtcctgtggaggccagcagcggtgtggcccccgcccccaggctgcctgtgtcttcacctgtcctgtccaccagcgccaacagccgtggggaagccaaggagacccaaggggtccaggaggtgggcgccctccatccttcgagaagcttcccaggctcctctgcttctctgtctcatgctcccaggctgcacagcaggcagggagggaggcaaggcaggggagtggggcctgagctgagcactgccccctcacccccccaccaccccttcccatttcatcggtggggacgtggagagggtggggcgggctggggttggagggtcccacccaccaccctgctgtgcttgggaacccccactccccactccccacatcccaacatcctggtgtctgtccccagtggggttggcgtgcatgtgtacatatgtatttgtgacttttctttgg

SEQ ID NO: 196 - protein, 493 aa, Homo sapiens
MDQDYERRLLRQIVIQNENTMPRVTEMRRTLTPASSPVSSPSKHGDRFIPSRAGANWSVNFHRINENEKSPSQNRKAKDATSDNGKDGLAYSALLKNELLGAGIEKVQDPQTEDRRLQPSTPEKKGLFTYSLSTKRSSPDDGNDVSPYSLSPVSNKSQKLLRSPRKPTRKISKIPFKVLDAPELQDDFYLNLVDWSSLNVLSVGLGTCVYLWSACTSQVTRLCDLSVEGDSVTSVGWSERGNLVAVGTHKGFVQIWDAAAGKKLSMLEGHTARVGALAWNAEQLSSGSRDRMILQRDIRTPPLQSERRLQGHRQEVCGLKWSTDHQLLASGGNDNKLLVWNHSSLSPVQQYTEHLAAVKAIAWSPHQHGLLASGGGTADRCIRFWNTLTGQPLQCIDTGSQVCNLAWSKHANELVSTHGYSQNQILVWKYPSLTQVAKLTGHSYRVLYLAMSPDGEAIVTGAGDETLRFWNVFSKTRSTKESVSVLNLFTRIR

SEQ ID NO: 197 - DNA, 3518 bp, Drosophila melanogaster
taacactgcactaaataattttaataaattatttgtatgaagtacgcgccaattggatgcgtttttgtcctatctgtcgaagatttcacgcatcccgaacaattgccagtgactgcacgccgtattatagccagggaacagctgtgcgtttgccattggccaacagttgttgtccacttcgcaattaccaagccatccaaaatcggctgtttaacgcgcgcttgattggatatttatgaacaattcagtgcaccaggatgtcgcaggacaggatcgccggcatcgatgtggcaaccaattccactgatatatcgaatatcattaacgagatgatcatctgcatcaagggcaagcagatgcccgaagttcacgaaaaagcaatggatcatttaagcaaaatgattgccgccaatagtcgggtcattcgggactcaaatatgttgactgagcgcgaatgtgtccagaagataatgaaactgctgagcgcccggaataagaaggaggagggcaaaactgtgtcggatcacttcaatgagctgtacaggaaactcacgttgaccaagtgcgatccgcacatgaggcactcgctaatgacccatctacttacgatgaccgacaattcggatgccgaaaaggcagttgccagcgaagatccacgtactcagtgcgataatctcactcagattctggtcagtcgtcttaactcaataagttcctccatagccagtctgaatgagatgggagtggtcaacggaaatggagtaggagcagcagcggtaacaggagcagcagcggtaacaggagcagcagcggtaacaggagcagcagcggtaacaggagcagcagcaagccacagttatgatgccacacagtccagcatcggattgagaaaacagtccttgcccaactacctggatgcaacaaagatgttgcccgagtctcgacatgatatagtgatgagtgccatttactccttcaccggcgttcaagggaagtatttgaagaaggatgtggtaacgggccgtttcaagctggatcagcagaacatcaagttcctgaccaccggccaagcgggcatgttgctgcggctctccgaacttggctactaccacgatcgagtggtcaagttttcggatgtatcgaccggtttcaatgccattggcagcatgggccaggccctgatttccaaactcaaggaggagctggcgaattttcacgggcaagtggcaatgcttcacgatgaaatgcagcgttttcggcaggcctcggtgaatggaattgcaaacaaggggaaaaaggatagtgggcccgatgctggcgatgaaatgacgctattcaagctgctcgcctggtatataaagccactgcaccggatgcagtggttaaccaagattgccgacgcctgccaggtaaagaagggcggtgatttggcatcgaccgtttatgatttccttgacaacggtaacgatatggtcaataaattggtggaggatctcctaactgccatttgtggcccactggtgcgcatgatctccaaatggattctggagggcggcattagcgatatgcatagagagttctttgtgaagtccattaaagatgtgggcgttgatcggctatggcacgataaattccgcctacgattgccaatgctgcccaagtttgtgcccatggatatggccaataagatactcatgacgggcaaatccattaattttctaagagaaatctgcgaggagcagggtatgatgaaggagcgcgacgaactaatgaaggtcatggaatctagtgcctctcaaatcttttcgtacacaccggacaccagttggcatgcggccgtggaaacgtgctaccagcagacctccaaacatgtcctcgacattatggtgggcccacacaagctgctggatcatttgcacggaatgcggcgctacttgctgttgggccagggcgattttattagcattctgattgaaaacatgaagaacgaactggagcgaccgggccttgatatatatgctaacgatctcacctccatgttggattccgctctgcgctgtacgaatgcccagtacgatgatcctgatattctaaaccatctcgatgtgattgttcaacgaccgttcaacggtgatattggctggaacatcatctcgctgcagtacattgtccacggaccactggccgccatgctggagtcgaccatgccaacgtacaaggtgctcttcaagccactctggcgcatgaagcacatggagtttgtgctctcgatgaagatctggaaggagcagatgggcaacgcaaaggcccttcgtacaatgaagtccgaaatcggcaaggcgtcacaccgcctcaaccttttcacttccgagatcatgcactttatccaccaaatgcagtactatgtgctatttgaggtcatcgagtgcaactgggtggagctacagaagaagatgcagaaggctactacgttggacgaaatcctggaagctcacgagaagtttctgcaaacgattttggtgggctgttttgtcagcaacaaagcgagtgtggagcattcgctggaggtggtgtacgagaacattatcgaattggagaagtggcagtcgagcttttacaaggactgctttaaggagctaaatgcccgcaaggaactgtccaaaattgtggagaaatcggaaaagaagggtgtctacggactgaccaacaagatgatcctgcagcgcgaccaggaggcgaagatatttgccgaaaagatggacatcgcctgccgcggcttagaagtcatagcaaccgattacgaaaaggctgtcagcactttcctaatgtctctcaactctagcgacgatccgaatttgcagctctttggcactcggctggacttcaacgagtactacaagaagagggacaccaatttgagcaaacccctgaccttcgagcacatgcgcatgagcaatgtgttcgccgtgaacagtcgcttcgtgatatgtacgccgtccactcaggaatagcgaccaatgtccatgcaatcggtttatcccagtgtccatacatcataccaaatcccaaatcccatacagcatcagcactccattcagttcaattgctgctaaatatttgagatatctcgatatcattggagccaatccaaccaaacaaactaatccaattattaactaagccttcgaatcgaaaacaacctctatacatatatatctcaagctttgccgtcaatcgcctggctgcaagccatcaacttaagatatctccaatacaaaattattgagtagttgtaacgaaagtattaagcgacaatttgtttgtcgaaaaacgcaacgttctattttgtttgcgaatcccataattttttttacatcgaagcttagttgaaatagattttcgtaagtgcatttgccaattgccatgttgtaattaaagagaataagagaatgttacgtactttaaaagaatgttttaaaaaagttaatgttttgaacagttttaaaccgtaatgcgag

SEQ ID NO: 198 - protein, 917 aa, Drosophila melanogaster
MSQDRIAGIDVATNSTDISNIINEMIICIKGKQMPEVHEKAMDHLSKMIAANSRVIRDSNMLTERECVQKIMKLLSARNKKEEGKTVSDHFNELYRKLTLTKCDPHMRHSLMTHLLTMTDNSDAEKAVASEDPRTQCDNLTQILVSRLNSISSSIASLNEMGVVNGNGVGAAAVTGAAAVTGAAAVTGAAAVTGAAASHSYDATQSSIGLRKQSLPNYLDATKMLPESRHDIVMSAIYSFTGVQGKYLKKDVVTGRFKLDQQNIKFLTTGQAGMLLRLSELGYYHDRVVKFSDVSTGFNAIGSMGQALISKLKEELANFHGQVAMLHDEMQRFRQASVNGIANKGKKDSGPDAGDEMTLFKLLAWYIKPLHRMQWLTKIADACQVKKGGDLASTVYDFLDNGNDMVNKLVEDLLTAICGPLVRMISKWILEGGISDMHREFFVKSIKDVGVDRLWHDKFRLRLPMLPKFVPMDMANKILMTGKSINFLREICEEQGMMKERDELMKVMESSASQIFSYTPDTSWHAAVETCYQQTSKHVLDIMVGPHKLLDHLHGMRRYLLLGQGDFISILIENMKNELERPGLDIYANDLTSMLDSALRCTNAQYDDPDILNHLDVIVQRPFNGDIGWNIISLQYIVHGPLAAMLESTMPTYKVLFKPLWRMKHMEFVLSMKIWKEQMGNAKALRTMKSEIGKASHRLNLFTSEIMHFIHQMQYYVLFEVIECNWVELQKKMQKATTLDEILEAHEKFLQTILVGCFVSNKASVEHSLEVVYENIIELEKWQSSFYKDCFKELNARKELSKIVEKSEKKGVYGLTNKMILQRDQEAKIFAEKMDIACRGLEVIATDYEKAVSTFLMSLNSSDDPNLQLFGTRLDFNEYYKKRDTNLSKPLTFEHMRMSNVFAVNSRFVICTPSTQE

SEQ ID NO: 199 - DNA, 3795 bp, Homo sapiens
caggaagggcgcgggccgcggtccctgcgcgtgcggcggcagtggcggctctgcccggaccaccgtgcacggctccgggcgaggatggcgaccccggaccagaagtcgccgaacgttctgctgcagaacctgtgctgcaggatcctgggcaggagcgaagctgatgtagcccagcagttccagtatgctgtgcgggtgattggcagcaacttcgccccaactgttgaaagagatgaatttttagtagctgaaaaaatcaagaaagagcttattcgacaacgaagagaagcagatgctgcattattttcagaactccacagaaaacttcattcacagggagttttgaaaaataaatggtcaatactctacctcttgctgagcctcagtgaggacccacgcaggcagccaagcaaggtttctagctatgctacgttatttgctcaggccttaccaagagatgcccactcaaccccttactactatgccaggcctcagacccttcccctgagctaccaagatcggagtgcccagtcagcccagagctccggcagcgtgggcagcagtggcatcagcagcattggcctgtgtgccctcagtggccccgcgcctgcgccacaatctctcctcccaggacagtctaatcaagctccaggagtaggagattgccttcgacagcagttggggtcacgactcgcatggactttaactgcaaatcagccttcttcacaagccactacctcaaaaggtgtccccagtgctgtgtctcgcaacatgacaaggtccaggagagaaggggatacgggtggtactatggaaattacagaagcagctctggtaagggacattttgtacgtctttcagggcatagatggcaaaaacatcaaaatgaacaacactgaaaattgttacaaagtagaaggaaaggcaaatctaagtaggtctttgagagacacagcagtcaggctttctgagttgggatggttgcataataaaatcagaagatacacggaccagaggagcctggaccgctcattcggactcgtcgggcagagcttttgtgctgccttgcaccaggaactcagagaatactatcgattgctctctgttttacattctcagctacaactagaggatgaccagggtgtgaatttgggacttgagagtagtttaacacttcggcgcctcctggtttggacctatgatcccaaaatacgactgaagacccttgcggccctagtggaccactgccaaggaaggaaaggaggtgagctggcctcagctgtccacgcctacacaaaaacaggagacccgtacatgcggtctctggtgcagcacatcctcagcctcgtgtctcatcctgttttgagcttcctgtaccgctggatatatgatggggagcttgaggacacttaccacgaattttttgtagcatcagatccaacagttaaaacagatcgactgtggcacgacaagtatactttgaggaaatcgatgattccttcgtttatgacgatggatcagtctaggaaggtccttttgataggaaaatcaataaatttcttgcaccaagtttgtcatgatcagactcccactacaaagatgatagctgtgaccaagtctgcagagtcaccccaggacgctgcagacctattcacagacttggaaaatgcatttcaggggaagattgatgctgcttattttgagaccagcaaatacctgttggatgttctcaataaaaagtacagcttgctggaccacatgcaggcaatgaggcggtacctgcttcttggtcaaggagactttataaggcacttaatggacttgctaaaaccagaacttgtccgtccagctacgactttgtatcagcataacttgactggaattctagaaaccgctgtcagagccaccaacgcacagtttgacagtcctgagatcctgcgaaggctggacgtgcggctgctggaggtctctccaggtgacactggatgggatgtcttcagcctcgattatcatgttgacggaccaattgcaactgtgtttactcgagaatgtatgagccactacctaagagtatttaacttcctctggagggcgaagcggatggaatacatcctcactgacatacggaagggacacatgtgcaatgcaaagctcctgagaaacatgccagagttctccggggtgctgcaccagtgtcacattttggcctctgagatggtccatttcattcatcagatgcagtattacatcacatttgaggtgcttgaatgttcttgggatgagctttggaacaaagtccagcaggcccaggatttggatcacatcattgctgcacacgaggtgttcttagacaccatcatctcccgctgcctgctggacagtgactccagggcacttttaaatcaacttagagctgtgtttgatcaaattattgaacttcagaatgctcaagatgcaatatacagagctgctctggaagaattgcagagacgattacagtttgaagagaaaaagaaacagcgtgaaattgagggccagtggggagtgacggcagcagaggaagaggaggaaaataagaggattggagaatttaaagaatctataccaaaaatgtgctcacagttgcgaatattgacccatttctaccagggtatcgtgcagcagtttttggtgttactgacgaccagctctgacgagagtcttcggtttcttagcttcaggctggacttcaacgagcattacaaagccagggagcccaggctccgtgtgtctctgggtaccagggggcggcgcagctcccacacgtgaagctcgcggtcctcccagggagctgcgggtgatgttcgttgcactgctagacacgaaattcccattgacgtcctgcaggaactgcatgctgcaggtgtcctgcccttccgcccacgagtgcgccatgtttcagcggagcggcgtgtgggagaagccacgtcgtgtttcacatgtcggagtcgaatgcatttgtaaatccctaagtcaagtaggctggctgcactgttcacatttgtctctaaaagtcttcatcgctaaaagataccataatttgctgaggcttcttaagctttctatgttataatttatatttgtcactttaaaaaatccatttcttttagaaaaaattagggtgataggatattcattagttaagatggtaacgtcattgctatttttttaacatcctctttagaggtaatttttgttaacataaccaaaaattaaattgaaacaaaatgtcccaactaagaaaatatatagagcattttatttttttttagtgttgtaaaatattaacctctgtgagatcctttgtatcttaatgcattacctttacacatatttattcttattttctctcctttcagagtttacatttttatatttaatttactatttcagatttttaaaatagtatagaaaaaagtaggagtgatagagaacaaaaatactcttatacagtgcaacccaaataccgcgaatgcatcagctaaagcagcgtgtaaataggagtgatgagaaagttaatggagtattttattttcaaagttcctgataagcattggaaagaaatcgacatggataatgaagatttcctttttccttgcctattttttcattgtaaatatttatatactactgaccaagatgttggggtgggggggattgttttttgtaaaaatgtcattatcaggtcacataaatctgcctttatgttgcataagtgaaaatttagaaaattaaaagcaattatctttcaaaaaa

SEQ ID NO: 200 - protein, 907 aa, Homo sapiens
MATPDQKSPNVLLQNLCCRILGRSEADVAQQFQYAVRVIGSNFAPTVERDEFLVAEKIKKELIRQRREADAALFSELHRKLHSQGVLKNKWSILYLLLSLSEDPRRQPSKVSSYATLFAQALPRDAHSTPYYYARPQTLPLSYQDRSAQSAQSSGSVGSSGISSIGLCALSGPAPAPQSLLPGQSNQAPGVGDCLRQQLGSRLAWTLTANQPSSQATTSKGVPSAVSRNMTRSRREGDTGGTMEITEAALVRDILYVFQGIDGKNIKMNNTENCYKVEGKANLSRSLRDTAVRLSELGWLHNKIRRYTDQRSLDRSFGLVGQSFCAALHQELREYYRLLSVLHSQLQLEDDQGVNLGLESSLTLRRLLVWTYDPKIRLKTLAALVDHCQGRKGGELASAVHAYTKTGDPYMRSLVQHILSLVSHPVLSFLYRWIYDGELEDTYHEFFVASDPTVKTDRLWHDKYTLRKSMIPSFMTMDQSRKVLLIGKSINFLHQVCHDQTPTTKMIAVTKSAESPQDAADLFTDLENAFQGKIDAAYFETSKYLLDVLNKKYSLLDHMQAMRRYLLLGQGDFIRHLMDLLKPELVRPATTLYQHNLTGILETAVRATNAQFDSPEILRRLDVRLLEVSPGDTGWDVFSLDYHVDGPIATVFTRECMSHYLRVFNFLWRAKRMEYILTDIRKGHMCNAKLLRNMPEFSGVLHQCHILASEMVHFIHQMQYYITFEVLECSWDELWNKVQQAQDLDHIIAAHEVFLDTIISRCLLDSDSRALLNQLRAVFDQIIELQNAQDAIYRAALEELQRRLQFEEKKKQREIEGQWGVTAAEEEEENKRIGEFKESIPKMCSQLRILTHFYQGIVQQFLVLLTTSSDESLRFLSFRLDFNEHYKAREPRLRVSLGTRGRRSSHT

SEQ ID NO: 201 - DNA, 761 bp, Drosophila melanogaster
atggagccagccgaaagtccagaaaaattaatgaaattcgtacgccgcagtgacgtactggaatacgtgggcaacacgagtgccgtcgatctatcgagcggtgatctctccgacatcgatctcaaggacgtgccggcccaactggaggccactttgaaaccgcgtcgctatgaagcaagcactttgtttaacattgacctggacgatatctgggatcctagctgtcaggaggacgaggtgcagcagtacaaggagcgcgcccagaaggagcagcaaaagttcttcgactttgtaatgcatgcggcactggacacggacaatcgcaaggttagcttcaagccaaacaaggagcagcagcgttacctagatcagggacccaatttgcaaaacttcgtgcgaagctcgttggctttcacaaacgcggccatccgatttcaggcggagcacgaggacatgatggagctgcagtgcaatatggacgatcactacctattcatgcggaacaccatgatcaacaacgctatacaccagaatatggccaaccaacggtgaccctaagctatgcataaatatacatatgtgaattgtagatattgataaattaaattaagactcagagattgtaagacggtttgcttttggcttatacagtataattcgcttagctgcctcgagtactttgcacaatgcctcgatgcaggtaacttaaaaatgcagctaacttaatttttttttttctattttctattttctattcacac

SEQ ID NO: 202 - protein, 183 aa, Drosophila melanogaster
MEPAESPEKLMKFVRRSDVLEYVGNTSAVDLSSGDLSDIDLKDVPAQLEATLKPRRYEASTLFNIDLDDIWDPSCQEDEVQQYKERAQKEQQKFFDFVMHAALDTDNRKVSFKPNKEQQRYLDQGPNLQNFVRSSLAFTNAAIRFQAEHEDMMELQCNMDDHYLFMRNTMINNAIHQNMANQR

SEQ ID NO: 203 - DNA, 723 bp, Drosophila melanogaster
atgatttatgcgatcgtgatacacatactgtcccttctggtgggctgtttctatccagcattcgcgtcctacaagatcctgaaaagtcagaattgtagcgtcaatgatcttcgcggatggttaatctactggattgcctatggagtttatgtggcctttgattatttcacagcgggtctgctggcatttattccattgctaagtgagttcaaggtgcttctcctgttctggatgttgccctctgtgggcggcggcagtgaggtgatctacgaggagttcctgcgatcctttagctgtaacgaatccttcgaccaggtcctgggacgtatcaccttggaatggggcgaattggtgtggcaacaagtttgctccgttcttagccatttgatggttttggcagatcgctatctcctgcccagcggtcatcgtcctgccctccaaataacgcccagcatcgaggatctggtcaacgatgccatagccaaaaggcagttggaagagaagcggaaacagatgggtaacttatctgataccatcaacgaggttttgggagaaaatatcgatttaaatatggatctgctgcacggatccgaatctgatttattggttattaaggagcctatttccaagcccaaggagagaccaataccgccgccgaagccaatgcgtcagccatcatcaagcaaccagcaagaaatgaatctttcgtcgcagtttatgtga

SEQ ID NO: 204 - protein, 240 aa, Drosophila melanogaster
MIYAIVIHILSLLVGCFYPAFASYKILKSQNCSVNDLRGWLIYWIAYGVYVAFDYFTAGLLAFIPLLSEFKVLLLFWMLPSVGGGSEVIYEEFLRSFSCNESFDQVLGRITLEWGELVWQQVCSVLSHLMVLADRYLLPSGHRPALQITPSIEDLVNDAIAKRQLEEKRKQMGNLSDTINEVLGENIDLNMDLLHGSESDLLVIKEPISKPKERPIPPPKPMRQPSSSNQQEMNLSSQFM

SEQ ID NO: 205 - DNA, 3856 bp, Homo sapiens
aacgccgggcagggcggcgggcgcgctcagtctggcggcggctgccgtgagctgactgacgttccgggaacgccgcagcagcccgcgccgcccgcagcctagccgagccgcgccgcccgggcctcgcccgcccgcctgcccgccatggtgtcatggatcatctccaggctggtggtgcttatatttggcaccctttaccctgcgtattattcctacaaggctgtgaaatcaaaggacattaaggaatatgtcaaatggatgatgtactggattatatttgcacttttcaccacagcagagacattcacagacatcttcctttgttggtttccattctattatgaactaaaaatagcatttgtagcctggctgctgtctccctacacaaaaggctccagcctcctgtacaggaagtttgtacatcccacactatcttcaaaagaaaaggaaatcgatgattgtctggtccaagcaaaagaccgaagttacgatgcccttgtgcacttcgggaagcggggcttgaacgtggccgccacagcggctgtgatggctgcttccaagggacagggtgccttatcggagagactgcggagcttcagcatgcaggacctcaccaccatcaggggagacggcgcccctgctccctcgggccccccaccaccggggtctgggcgggccagcggcaaacacggccagcctaagatgtccaggagtgcttctgagagcgctagcagctcaggcaccgcctagaatccttcgatctcgcttcaggaagaaaagtacctcatcctcggccaccgaaaccacgtgagtgagatgagccaacagcaccggatccacagaatgtttcttctctgccttaaagagctattcactaataacatagaaatccgcaagctgggtgtgctttgagtgtgcagcctcacaaacatggccttttctctctccccttccacttttaaggatttatttttttcccccttttctttattttgctggggagaggctaaagggaaaggtagtaggggcgggggtggtgacctttaagtcttctgaggttggtaattttccacaattggattgtcattatagacagcagtgtgttttttagaaagataagagaatcacccctatgctgctgagatgtacatttgtaatttatctgttgcatacttagtttttagtcctgtaaatgcaaacacagcattttttacaactttctttgttcttggtacttatactttgaactatgatgtacatatttatggcttttggcttttaatataatggacttgcaagggctgccagaggttctgatatgtaagaaaactgcaaaaacaaatatagacaaatattttgattctagagaacgtctcagatgtgcttataaagcttccaaatacaactccagtaagacatccctttccctgcaggagtgtggtctatattctttagatagttgtttagtcaaaagaccagacaagttacaaactaagagaaacaatatttcacaacacagtaaagtgtgatgagaggtcaggggaacatcccagtaaaagagaagagtcacaggaagctcatctcctccctggattctggattaggagcttctgaatcttttccagggataggcaggtagctcactcttggtgcaatttcttgaggatgggaacatgtagagctgctggaaggagtaattctgtgcttgacaaaggacgatttctcctttatcgtgaccagtgctgccgatttcctgacagaggagcttacactctgagcaccttgttttagcgaactctagcaaaacttgtttagcttagcaaaaacaaacacacaaaaaactgagaactctgctgtttcagatatgccataacatacatctgaaacacatgtgtaacaatcaaaatggtgggctctagaatggttttggagctcgagatcttcatgggttagacttgctggtcagacccaggagcacctgtggctcacaccttctgttcccctcctggcctgtgcagaatgtaaacagcagactcatactcaatgggcactacaggccttatcagacgttttatacaagcctggattgcttagtaggggaataaggcattctctgagggggctttccacttagattgagaattttatttgaaaagaatctggtttaaatggcattgtggtccgaggtagctgctctccccactgagagctgagccgaaatataagaataatatatttgtgcttcgagttggtgtttctttcagtgtaatgcatgcagtggtcacaacccagttactcataatatttggattgtatttgttcgtagatatgcccagaagactagagaattagtgttatataccatatagaacttactgtcagtcaactataaacaggcccaattaaaaactgttccattactacgcaaacacatattagaggcctttgctgatgacacattagctggatcttagccaccccagaaagggtttgatttgaagctgattgttgccagatatgcatattggaatcccatctacccatagttcctctgaaggtgattttgtaatttgcaaaagggtataggaaaatatacctaaaagcgaatttgtggctgagaggataaacagaagctgtttgctcatgttctgtgccccacacccaccaatacctaaatctgttaaggaagacagaaaatgttttctttgtgctcattgagtagttccagacagaagaagaatatactctttaaaatgtatttacctgttagttggaagtacccagaattatcagaaacgaatgcaaaaaaaaaaaaaaaaaaaaaaagcttacacagcttcttagcaattttttttttttttgccgaaacaataaattgcctttagcagcagtttaaaatcctatcgtgaacaacctatattttcgccattttacaatggagagttgtgacaagtacaggttatcaagtttgcacttaactatgccaaaaaaagtttgaagcgctctattctcagacatgctgtattattacttctcattcaagattgaaaaatataaaggtatccaaactctgtcttaatgtaaatgtaactatttttccttcaagtgttgactagggagtcggtttctctcttaaagacactcactgtacaactgaaagcagctgtcatatttctggcaaaatgtgtttacgtatctgacaagttgtacatttgtgtatgaactgacataaaatgtgaaagcctgtaagtgtacatgtagtggtgtggtgttctgtctagaggatacaactgaatgtttttaatttgctgacttacagacacaggctgtttacaaaatgctagctggaaagtctgtaatgttcatgtcataacttttagttaattgccattgagcacctgttctgaggaggtgagatgtggacttgtgcttataaactggagagtttagtcataatccctcctggctttgtgtgaatagcttgctcactttgctggcctttgaaatgtgttctccgtgataagctatccatgtgtttgtgataagagtgcttgtcaaccatgaccatctttgagccttcctagtcctccacctggcacagtatttgaaatggcaaaggatgtgcttcatcctctaacaaacagtgtacactcccagagctgatattctggattgtgactgtgcacatttcctctagttcatgtctgtagtccctatagaatgatctgtaataaaatagtatactggactgtgcatcaaagggatgtaaaattacagtattccaaaggttgaagttctgctgttttgttataatgcctgatacacatcttgaataaagtcttaacatttttctttt

SEQ ID NO: 206 - protein, 240 aa, Homo sapiens; identical to SEQ ID NO: 204

SEQ ID NO: 207 - DNA, 2838 bp, Drosophila melanogaster
atgctgttcaacaaatgtctggaaaagttgtccagctcgctgggcaatgtggtcaatcacaagctgcaagagaaacaagtctacaacaacaacaatatcaacaataacaataacaatacgctaaacaacaacaatgcctacaacaatcagcgaaactttgagtacgaaagagccatacaggcgcactacggaagcaagggaagacgctcggaggagcgcgaaaggagcggcaagttcaaggccagcaagggtcggaaagcaaaggtcaccccaccaacggagacacccgaggcccaggagccggcctgcaagaactgtatgacccacgacgagctggcccagatcataaagggcgtggccaagggcgctgacgcgcaacgtaatcgagacaaccgactgcagcgcagacgtcgtcctctctccgcccaaccctccgccgctgcctccgcctccacatcgacggaatctctgcaccgtcttacacccagcccgcaggcttcctacccggccacgcccacctcctggacagccacaccgccccagttcccagccgccttcggcggcgccagctgctccaacagcacactgtccctcttggccaccatgcgcgtccagctccatggttacacatggtttcatggcaatctttccggaaaggaagcggaaaaattgatcctggagcggggcaagaatggttcgtttctcgtccgtgaatctcagagcaagcctggcgacttcgtcctttccgtgcgcacggacgacaaagtaacgcatgtcatgattcgatggcaggacaagaagtacgacgtcggcggcggggaatcctttggcaccttgtcggaactgatcgatcactacaagcgtaatcccatggtggagacgtgcggaaccgtggtgcatctgcgacagccattcaacgccacacgaatcacggcggccggcatcaatgcccgggtggaacagctggtcaagggaggtttctgggaggaattcgaatcgctgcaacaggacagtcgggacacattctcgcgcaacgagggctacaaacaggagaaccgcctcaagaatcgctaccgcaacatattgccatacgaccacacgcgcgtcaagctgctggacgtggagcatagcgtggccggagccgagtacatcaatgccaactacatacggctgcccaccgacggcgacctgtacaacatgagcagctcgtcggagagcctgaacagctcggtgccctcgtgccccgcctgcacggctgcccagacacagcggaactgctccaactgccagctgcaaaacaagacgtgcgtgcagtgcgccgtgaagagcgccattctgccgtatagcaactgtgccacctgcagccgcaagtcagactccctgagcaagcacaagcggagcgaatcctcggcctcttcatcgccctcctccggctctgggtccggaccaggatcgtcgggcaccagcggagtgagcagcgtcaatggacccggcacacccaccaatctcacgagcggcacagccggatgtctggtcggcctgctgaagagacactcgaacgactcgtccggagctgtttctatatcgatggccgaacgggaacgcgagagggagcgcgagatgtttaagacctacatcgccacccagggctgtctgctcacccagcaagtgaacacggtgacggacttctggaacatggtctggcaggagaacacgcgggtgatcgtcatgaccaccaaggagtacgagcgcggcaaagaaaagtgcgcccgctactggccggacgagggtagatcggagcagttcggccacgcgcggatacagtgcgtctcggagaactcgaccagtgactatacgctgcgcgagttcctcgtctcgtggcgggatcagccggcgcgccggatctttcactaccatttccaggtgtggccggatcacggagtgcccgccgatccgggctgtgtgctcaacttcctgcaagatgtcaacacgcgtcagagtcacctggctcaagcgggcgagaagccgggtccgatctgcgtgcactgctctgcgggcatcggtcgcactggcacctttattgtgatcgatatgattctcgatcagattgtgcgcaatggattggatactgaaatcgacatccagcgcaccattcagatggtccgatcgcagcgttccggtcttgtgcaaaccgaggcgcaatacaagttcgtctactatgcggtgcagcactatatacagaccctgatcgcccggaaacgagctgaggagcagagcctgcaggttggccgcgagtacaccaatataaagtacacgggcgaaattggaaacgattcacaaagatctccattaccaccagcaatttctagcataagtttagttccgagtaagacgccactgacgccgacatcggcggatttgggcactgggatgggcctaagcatgggcgtgggcatgggcgtcggcaacaagcacgcatcgaagcagcagccgccgttgccggtggtcaactgcaacaataataacaacggcattggcaatagcggctgcagcaacggcggcgggagcagcaccaccagcagcagcaacggcagcagcaacggtaacatcaacgccctactgggcggcatcggcttggggctgggcggcaatatgcgcaagtcgaacttttacagcgactcgctgaagcagcaacagcagcgcgaggagcaggctccggcgggagcaggtaagatgcagcagccggcgccgccgctgcgaccgcgtcctggaatactcaagttgctcaccagtcccgtcatctttcagcaaaattcaaaaacattcccaaagacatga

SEQ ID NO: 208 - protein, 945 aa, Drosophila melanogaster
MLFNKCLEKLSSSLGNVVNHKLQEKQVYNNNNINNNNNNTLNNNNAYNNQRNFEYERAIQAHYGSKGRRSEERERSGKFKASKGRKAKVTPPTETPEAQEPACKNCMTHDELAQIIKGVAKGADAQRNRDNRLQRRRRPLSAQPSAAASASTSTESLHRLTPSPQASYPATPTSWTATPPQFPAAFGGASCSNSTLSLLATMRVQLHGYTWFHGNLSGKEAEKLILERGKNGSFLVRESQSKPGDFVLSVRTDDKVTHVMIRWQDKKYDVGGGESFGTLSELIDHYKRNPMVETCGTVVHLRQPFNATRITAAGINARVEQLVKGGFWEEFESLQQDSRDTFSRNEGYKQENRLKNRYRNILPYDHTRVKLLDVEHSVAGAEYINANYIRLPTDGDLYNMSSSSESLNSSVPSCPACTAAQTQRNCSNCQLQNKTCVQCAVKSAILPYSNCATCSRKSDSLSKHKRSESSASSSPSSGSGSGPGSSGTSGVSSVNGPGTPTNLTSGTAGCLVGLLKRHSNDSSGAVSISMAEREREREREMFKTYIATQGCLLTQQVNTVTDFWNMVWQENTRVIVMTTKEYERGKEKCARYWPDEGRSEQFGHARIQCVSENSTSDYTLREFLVSWRDQPARRIFHYHFQVWPDHGVPADPGCVLNFLQDVNTRQSHLAQAGEKPGPICVHCSAGIGRTGTFIVIDMILDQIVRNGLDTEIDIQRTIQMVRSQRSGLVQTEAQYKFVYYAVQHYIQTLIARKRAEEQSLQVGREYTNIKYTGEIGNDSQRSPLPPAISSISLVPSKTPLTPTSADLGTGMGLSMGVGMGVGNKHASKQQPPLPVVNCNNNNNGIGNSGCSNGGGSSTTSSSNGSSNGNINALLGGIGLGLGGNMRKSNFYSDSLKQQQQREEQAPAGAGKMQQPAPPLRPRPGILKLLTSPVIFQQNSKTFPKT

SEQ ID NO: 209 - DNA, 2677 bp, Drosophila melanogaster
agtaaaaaaatagttttttttttgtatccaaccaaccaactgtaaaaataagtttaaacaaagcatctactcataagtttcatttttttccgttaagtgtcaacattatttattttttaagtgtgcattcaataagaaaatgtcatcgcgaagatggttccacccaacgatatctggcatcgaagctgagaaactgctgcaggagcagggattcgacggctccttcctcgcccgcctctcctcctcgaatccgggcgccttcacgctctccgtgcgccgcggcaacgaggtgacccacatcaaaatccaaaacaatggcgacttctttgatctctacggtggtgaaaagttcgccacactgccggaactggtacaatactacatggagaatggcgagctaaaggagaagaacggccaggccatcgaactcaagcagccgctgatctgcgccgagcccaccacggaaagatggtttcatggcaatctttccggaaaggaagcggaaaaattgatcctggagcggggcaagaatggttcgtttctcgtccgtgaatctcagagcaagcctggcgacttcgtcctttccgtgcgcacggacgacaaagtaacgcatgtcatgattcgatggcaggacaagaagtacgacgtcggcggcggggaatcctttggcaccttgtcggaactgatcgatcactacaagcgtaatcccatggtggagacgtgcggaaccgtggtgcatctgcgacagccattcaacgccacacgaatcacggcggccggcatcaatgcccgggtggaacagctggtcaagggaggtttctgggaggaattcgaatcgctgcaacaggacagtcgggacacattctcgcgcaacgagggctacaaacaggagaaccgcctcaagaatcgctaccgcaacatattgccatacgaccacacgcgcgtcaagctgctggacgtggagcatagcgtggccggagccgagtacatcaatgccaactacatacggctgcccaccgacggcgacctgtacaacatgagcagctcgtcggagagcctgaacagctcggtgccctcgtgccccgcctgcacggctgcccagacacagcggaactgctccaactgccagctgcaaaacaagacgtgcgtgcagtgcgccgtgaagagcgccattctgccgtatagcaactgtgccacctgcagccgcaagtcagactccctgagcaagcacaagcggagcgaatcctcggcctcttcatcgccctcctccggctctgggtccggaccaggatcgtcgggcaccagcggagtgagcagcgtcaatggacccggcacacccaccaatctcacgagcggcacagccggatgtctggtcggcctgctgaagagacactcgaacgactcgtccggagctgtttctatatcgatggccgaacgggaacgcgagagggagcgcgagatgtttaagacctacatcgccacccagggctgtctgctcacccagcaagtgaacacggtgacggacttctggaacatggtctggcaggagaacacgcgggtgatcgtcatgaccaccaaggagtacgagcgcggcaaagaaaagtgcgcccgctactggccggacgagggtagatcggagcagttcggccacgcgcggatacagtgcgtctcggagaactcgaccagtgactatacgctgcgcgagttcctcgtctcgtggcgggatcagccggcgcgccggatctttcactaccatttccaggtgtggccggatcacggagtgcccgccgatccgggctgtgtgctcaacttcctgcaagatgtcaacacgcgtcagagtcacctggctcaagcgggcgagaagccgggtccgatctgcgtgcactgctctgcgggcatcggtcgcactggcacctttattgtgatcgatatgattctcgatcagattgtgcgcaatggattggatactgaaatcgacatccagcgcaccattcagatggtccgatcgcagcgttccggtcttgtgcaaaccgaggcgcaatacaagttcgtctactatgcggtgcagcactatatacagaccctgatcgcccggaaacgagctgaggagcagagcctgcaggttggccgcgagtacaccaatataaagtacacgggcgaaattggaaacgattcacaaagatctccattaccaccagcaatttctagcataagtttagttccgagtaagacgccactgacgccgacatcggcggatttgggcactgggatgggcctaagcatgggcgtgggcatgggcgtcggcaacaagcacgcatcgaagcagcagccgccgttgccggtggtcaactgcaacaataataacaacggcattggcaatagcggctgcagcaacggcggcgggagcagcaccaccagcagcagcaacggcagcagcaacggtaacatcaacgccctactgggcggcatcggcttggggctgggcggcaatatgcgcaagtcgaacttttacagcgactcgctgaagcagcaacagcagcgcgaggagcaggctccggcgggagcaggtaagatgcagcagccggcgccgccgctgcgaccgcgtcctggaatactcaagttgctcaccagtcccgtcatctttcagcaaaattcaaaaacattcccaaagacatga

SEQ ID NO: 210 - protein, 845 aa, Drosophila melanogaster
MSSRRWFHPTISGIEAEKLLQEQGFDGSFLARLSSSNPGAFTLSVRRGNEVTHIKIQNNGDFFDLYGGEKFATLPELVQYYMENGELKEKNGQAIELKQPLICAEPTTERWFHGNLSGKEAEKLILERGKNGSFLVRESQSKPGDFVLSVRTDDKVTHVMIRWQDKKYDVGGGESFGTLSELIDHYKRNPMVETCGTVVHLRQPFNATRITAAGINARVEQLVKGGFWEEFESLQQDSRDTFSRNEGYKQENRLKNRYRNILPYDHTRVKLLDVEHSVAGAEYINANYIRLPTDGDLYNMSSSSESLNSSVPSCPACTAAQTQRNCSNCQLQNKTCVQCAVKSAILPYSNCATCSRKSDSLSKHKRSESSASSSPSSGSGSGPGSSGTSGVSSVNGPGTPTNLTSGTAGCLVGLLKRHSNDSSGAVSISMAEREREREREMFKTYIATQGCLLTQQVNTVTDFWNMVWQENTRVIVMTTKEYERGKEKCARYWPDEGRSEQFGHARIQCVSENSTSDYTLREFLVSWRDQPARRIFHYHFQVWPDHGVPADPGCVLNFLQDVNTRQSHLAQAGEKPGPICVHCSAGIGRTGTFIVIDMILDQIVRNGLDTEIDIQRTIQMVRSQRSGLVQTEAQYKFVYYAVQHYIQTLIARKRAEEQSLQVGREYTNIKYTGEIGNDSQRSPLPPAISSISLVPSKTPLTPTSADLGTGMGLSMGVGMGVGNKHASKQQPPLPVVNCNNNNNGIGNSGCSNGGGSSTTSSSNGSSNGNINALLGGIGLGLGGNMRKSNFYSDSLKQQQQREEQAPAGAGKMQQPAPPLRPRPGILKLLTSPVIFQQNSKTFPKT

SEQ ID NO: 211 - DNA, 1936 bp, Drosophila melanogaster
atttagtataaaagcacgcctgttatcggctaaatttacaaaaaaaaagggaaaattaaaaaattaaaacacttaaataaacgctttcctgggttaaccgcgcacgaatggccacccgtggggccggctcgactgtggtccacacgacggtgacagcgctgacggtggagacgatcaccaatgtcctgaccacggtgacttcgttccattcgaacagcgtcaacatttcgaacaacaacagcagcagtggagcggccccgggggcggatgcagctggcggcgatgcagggggcgtggcagcggctcaggcggacgccaacaagcctatctatcctcggctctttaaccgcatcgtgctgacgctggagaacagcctcattccggagggcaaaatcgatgtgacgccatccagccaggatggactggaccatgagacggagaaggacctgcgcatactgggctgcgagcttattcagacagccggaattttgctgcgcttgccgcaggttgccatggccaccggccaggtgctgttccagcgcttcttctactcgaagagctttgtgcggcacaacatggagactgtggccatgagctgcgtgtgcctggcgtccaagatcgaggaggcgccgcgccgcattagagacgtgatcaatgtgttccatcacatcaagcaagtgcgggcccaaaaggaaatctcgcccatggtgctagatccttactacacgaacctcaagatgcaggtgatcaaggccgagcggcgcgtcctcaaggaactgggcttctgtgtacacgtgaagcatccgcacaagctgatcgtgatgtatctgcaggtgcttcagtacgagaagcacgagaagctgatgcagctctcctggaacttcatgaatgactcgctgaggacggacgtttttatgcgctacacaccagaggcgattgcatgcgcctgcatctacctgagtgcccgcaagctcaacatacctctgcccaacagcccgccgtggttcggcatttttcgggtgcccatggcggacattacggatatctgctaccgtgtgatggagctgtacatgcgttccaagccggtggtggagaaactggaggcggccgtggacgagctgaaaaagcggtacattgatgcgcgcaacaaaacgaaggaggcaaacacaccgccggctgtaatcaccgtggatcggaacaatggctcgcacaatgcgtggggtggcttcatccagcgtgctatcccactgcccttgccatcggaaaagtcgccgcaaaaggattcgaggtcacgctcgcgatccaggacgcgcacccattcgcggacacctcgctcccgatcacccaggtccaggtcgcctagtcgcgagcgcactaagaagacccaccgcagtcgatcctcccgctcgcgctcccgttcgccgccgaagcataagaaaaagtcacgtcactactcgaggtcgcccacgcgctccaattcgccgcacagcaagcacaggaagtcgaaatcctcgcgagaacgctctgaatactactccaagaaagatcggtctggaaacccaggcagtagcaataatctaggtgatggcgacaagtatcgcaactccgtctccaattccggcaagcacagtcggtactcctcctcctcgtcgcgtcggaacagcggtggtggtggagacggaagaagcggaggaggaggtggtggcggcggtggaggcaacgggaaccacggcagccgaggggggcacaagcatcgggatggcgatcgctccagggatcgcaagcgctagtgattgatagacaagcgagacaaacactcccttatatttaattgctctttattttacaaatttacagattatttctaccgatttagtaatgctaatgtgtattgaaaaaacgaacgcgggtaaacaataaatgtaactcttcaatc

SEQ ID NO: 212 - protein, 560 aa, Drosophila melanogaster
MATRGAGSTVVHTTVTALTVETITNVLTTVTSFHSNSVNISNNNSSSGAAPGADAAGGDAGGVAAAQADANKPIYPRLFNRIVLTLENSLIPEGKIDVTPSSQDGLDHETEKDLRILGCELIQTAGILLRLPQVAMATGQVLFQRFFYSKSFVRHNMETVAMSCVCLASKIEEAPRRIRDVINVFHHIKQVRAQKEISPMVLDPYYTNLKMQVIKAERRVLKELGFCVHVKHPHKLIVMYLQVLQYEKHEKLMQLSWNFMNDSLRTDVFMRYTPEAIACACIYLSARKLNIPLPNSPPWFGIFRVPMADITDICYRVMELYMRSKPVVEKLEAAVDELKKRYIDARNKTKEANTPPAVITVDRNNGSHNAWGGFIQRAIPLPLPSEKSPQKDSRSRSRSRTRTHSRTPRSRSPRSRSPSRERTKKTHRSRSSRSRSRSPPKHKKKSRHYSRSPTRSNSPHSKHRKSKSSRERSEYYSKKDRSGNPGSSNNLGDGDKYRNSVSNSGKHSRYSSSSSRRNSGGGGDGRSGGGGGGGGGGNGNHGSRGGHKHRDGDRSRDRKR

SEQ ID NO: 213 - DNA, 2768 bp, Homo sapiens
cggccgcggtttccaggaggaagcaaggatgctttggacactgtgcgtggcgcctccgcggagcccccgcgctgccattcccggccgtcgctcggtcctccgctgacgggaagcaggaagtggcggcgggcgtcgcgagcggtgacatcacgggggcgacggcggcgaagggcgggggcggaggaggagcgagccgggccggggggcagctgcacagtctccgggatccccaggcctggaggggggtctgtgcgcggccggctggctctgccccgcgtccggtcccgagcgggcctccctcgggccagcccgatgtgaccgagcccagcggagcctgagcaaggagcgggtccgtcgcggagccggagggcgggaggaacatgacatcgcggagatggtttcacccaaatatcactggtgtggaggcagaaaacctactgttgacaagaggagttgatggcagttttttggcaaggcctagtaaaagtaaccctggagacttcacactttccgttagaagaaatggagctgtcacccacatcaagattcagaacactggtgattactatgacctgtatggaggggagaaatttgccactttggctgagttggtccagtattacatggaacatcacgggcaattaaaagagaagaatggagatgtcattgagcttaaatatcctctgaactgtgcagatcctacctctgaaaggtggtttcatggacatctctctgggaaagaagcagagaaattattaactgaaaaaggaaaacatggtagttttcttgtacgagagagccagagccaccctggagattttgttctttctgtgcgcactggtgatgacaaaggggagagcaatgacggcaagtctaaagtgacccatgttatgattcgctgtcaggaactgaaatacgacgttggtggaggagaacggtttgattctttgacagatcttgtggaacattataagaagaatcctatggtggaaacattgggtacagtactacaactcaagcagccccttaacacgactcgtataaatgctgctgaaatagaaagcagagttcgagaactaagcaaattagctgagaccacagataaagtcaaacaaggcttttgggaagaatttgagacactacaacaacaggagtgcaaacttctctacagccgaaaagagggtcaaaggcaagaaaacaaaaacaaaaatagatataaaaacatcctgccctttgatcataccagggttgtcctacacgatggtgatcccaatgagcctgtttcagattacatcaatgcaaatatcatcatgcctgaatttgaaaccaagtgcaacaattcaaagcccaaaaagagttacattgccacacaaggctgcctgcaaaacacggtgaatgacttttggcggatggtgttccaagaaaactcccgagtgattgtcatgacaacgaaagaagtggagagaggaaagagtaaatgtgtcaaatactggcctgatgagtatgctctaaaagaatatggcgtcatgcgtgttaggaacgtcaaagaaagcgccgctcatgactatacgctaagagaacttaaactttcaaaggttggacaagggaatacggagagaacggtctggcaataccactttcggacctggccggaccacggcgtgcccagcgaccctgggggcgtgctggacttcctggaggaggtgcaccataagcaggagagcatcatggatgcagggccggtcgtggtgcactgcagtgctggaattggccggacagggacgttcattgtgattgatattcttattgacatcatcagagagaaaggtgttgactgcgatattgacgttcccaaaaccatccagatggtgcggtctcagaggtcagggatggtccagacagaagcacagtaccgatttatctatatggcggtccagcattatattgaaacactacagcgcaggattgaagaagagcagaaaagaaagaggaaagggcacgaatatacaaatattaagtattctctagcggaccagacgagtggagatcagagccctctcccgccttgtactccaacgccaccctgtgcagaaatgagagaagacagtgctagagtctatgaaaacgtgggcctgatgcaacagcagaaaagtttcagatgagaaaacctgccaaaacttcagcacagaaatagatgtggactttcaccctctccctaaaaagatcaagaacagacgcaagaaagtttatgtgaagacagaatttggatttggaaggcttgcaatgtggttgactaccttttgataagcaaaatttgaaaccatttaaagaccactgtattttaactcaacaatacctgcttcccaattactcatttcctcagataagaagaaatcatctctacaatgtagacaacattatattttatagaatttgtttgaaattgaggaagcagttaaattgtgcgctgtattttgcagattatggggattcaaattctagtaataggcttttttatttttatttttatacccttaaccagtttaattttttttttcctcattgttggggatgatgagaagaaatgatttgggaaaattaagtaacaacgacctagaaaagtgagaacaatctcatttaccatcatgtatccagtagtggataattcattttgatggcttctatttttggccaaatgagaattaagccagtgcctgagactgtcagaagttgacctttgcactggcattaaagagtcatagaaaaaa

SEQ ID NO: 214 - protein, 593 aa, Homo sapiens
MTSRRWFHPNITGVEAENLLLTRGVDGSFLARPSKSNPGDFTLSVRRNGAVTHIKIQNTGDYYDLYGGEKFATLAELVQYYMEHHGQLKEKNGDVIELKYPLNCADPTSERWFHGHLSGKEAEKLLTEKGKHGSFLVRESQSHPGDFVLSVRTGDDKGESNDGKSKVTHVMIRCQELKYDVGGGERFDSLTDLVEHYKKNPMVETLGTVLQLKQPLNTTRINAAEIESRVRELSKLAETTDKVKQGFWEEFETLQQQECKLLYSRKEGQRQENKNKNRYKNILPFDHTRVVLHDGDPNEPVSDYINANIIMPEFETKCNNSKPKKSYIATQGCLQNTVNDFWRMVFQENSRVIVMTTKEVERGKSKCVKYWPDEYALKEYGVMRVRNVKESAAHDYTLRELKLSKVGQGNTERTVWQYHFRTWPDHGVPSDPGGVLDFLEEVHHKQESIMDAGPVVVHCSAGIGRTGTFIVIDILIDIIREKGVDCDIDVPKTIQMVRSQRSGMVQTEAQYRFIYMAVQHYIETLQRRIEEEQKRKRKGHEYTNIKYSLADQTSGDQSPLPPCTPTPPCAEMREDSARVYENVGLMQQQKSFR

SEQ ID NO: 215 - DNA, 1892 bp, Homo sapiens
gcggaggaggagcgagccgggccggggggcagctgcacagtctccgggatccccaggcctggaggggggtctgtgcgcggccggctggctctgccccgcgtccggtcccgagcgggcctccctcgggccagcccgatgtgaccgagcccagcggagcctgagcaaggagcgggtccgtcgcggagccggagggcgggaggaacatgacatcgcggagatggtttcacccaaatatcactggtgtggaggcagaaaacctactgttgacaagaggagttgatggcagttttttggcaaggcctagtaaaagtaaccctggagacttcacactttccgttagaagaaatggagctgtcacccacatcaagattcagaacactggtgattactatgacctgtatggaggggagaaatttgccactttggctgagttggtccagtattacatggaacatcacgggcaattaaaagagaagaatggagatgtcattgagcttaaatatcctctgaactgtgcagatcctacctctgaaaggtggtttcatggacatctctctgggaaagaagcagagaaattattaactgaaaaaggaaaacatggtagttttcttgtacgagagagccagagccaccctggagattttgttctttctgtgcgcactggtgatgacaaaggggagagcaatgacggcaagtctaaagtgacccatgttatgattcgctgtcaggaactgaaatacgacgttggtggaggagaacggtttgattctttgacagatcttgtggaacattataagaagaatcctatggtggaaacattgggtacagtactacaactcaagcagccccttaacacgactcgtataaatgctgctgaaatagaaagcagagttcgagaactaagcaaattagctgagaccacagataaagtcaaacaaggcttttgggaagaatttgagacactacaacaacaggagtgcaaacttctctacagccgaaaagagggtcaaaggcaagaaaacaaaaacaaaaatagatataaaaacatcctgccctttgatcataccagggttgtcctacacgatggtgatcccaatgagcctgtttcagattacatcaatgcaaatatcatcatgcctgaatttgaaaccaagtgcaacaattcaaagcccaaaaagagttacattgccacacaaggctgcctgcaaaacacggtgaatgacttttggcggatggtgttccaagaaaactcccgagtgattgtcatgacaacgaaagaagtggagagaggaaagagtaaatgtgtcaaatactggcctgatgagtatgctctaaaagaatatggcgtcatgcgtgttaggaacgtcaaagaaagcgccgctcatgactatacgctaagagaacttaaactttcaaaggttggacaagggaatacggagagaacggtctggcaataccactttcggacctggccggaccacggcgtgcccagcgaccctgggggcgtgctggacttcctggaggaggtgcaccataagcaggagagcatcatggatgcagggccggtcgtggtgcactgcaggtgacagctcctgctgcccctctaggccacagcctgtccctgtctcctagcgcccagggcttgcttttacctacccactcctagctctttaactgtaggaagaatttaatatctgtttgaggcatagagcaactgcattgagggacattttgatcccaaggcatatttctcctagaccctacagcactgccattggccatggccatggcaacatgctcagttaaaacagcaaagactaagtcagcattatctctgagtccaccagaagttgtgcattaaacaacttcatcctggaaaaaaaaaaaaaaaa

SEQ ID NO: 216 - protein, 460 aa, Homo sapiens
MTSRRWFHPNITGVEAENLLLTRGVDGSFLARPSKSNPGDFTLSVRRNGAVTHIKIQNTGDYYDLYGGEKFATLAELVQYYMEHHGQLKEKNGDVIELKYPLNCADPTSERWFHGHLSGKEAEKLLTEKGKHGSFLVRESQSHPGDFVLSVRTGDDKGESNDGKSKVTHVMIRCQELKYDVGGGERFDSLTDLVEHYKKNPMVETLGTVLQLKQPLNTTRINAAEIESRVRELSKLAETTDKVKQGFWEEFETLQQQECKLLYSRKEGQRQENKNKNRYKNILPFDHTRVVLHDGDPNEPVSDYINANIIMPEFETKCNNSKPKKSYIATQGCLQNTVNDFWRMVFQENSRVIVMTTKEVERGKSKCVKYWPDEYALKEYGVMRVRNVKESAAHDYTLRELKLSKVGQGNTERTVWQYHFRTWPDHGVPSDPGGVLDFLEEVHHKQESIMDAGPVVVHCR

SEQ ID NO: 217 - DNA, 2069 bp, Homo sapiens
cggccgcggtttccaggaggaagcaaggatgctttggacactgtgcgtggcgcctccgcggagcccccgcgctgccattcccggccgtcgctcggtcctccgctgacgggaagcaggaagtggcggcgggcgtcgcgagcggtgacatcacgggggcgacggcggcgaagggcgggggcggaggaggagcgagccgggccggggggcagctgcacagtctccgggatccccaggcctggaggggggtctgtgcgcggccggctggctctgccccgcgtccggtcccgagcgggcctccctcgggccagcccgatgtgaccgagcccagcggagcctgagcaaggagcgggtccgtcgcggagccggagggcgggaggaacatgacatcgcggagatggtttcacccaaatatcactggtgtggaggcagaaaacctactgttgacaagaggagttgatggcagttttttggcaaggcctagtaaaagtaaccctggagacttcacactttccgttagaagaaatggagctgtcacccacatcaagattcagaacactggtgattactatgacctgtatggaggggagaaatttgccactttggctgagttggtccagtattacatggaacatcacgggcaattaaaagagaagaatggagatgtcattgagcttaaatatcctctgaactgtgcagatcctacctctgaaaggtggtttcatggacatctctctgggaaagaagcagagaaattattaactgaaaaaggaaaacatggtagttttcttgtacgagagagccagagccaccctggagattttgttctttctgtgcgcactggtgatgacaaaggggagagcaatgacggcaagtctaaagtgacccatgttatgattcgctgtcaggaactgaaatacgacgttggtggaggagaacggtttgattctttgacagatcttgtggaacattataagaagaatcctatggtggaaacattgggtacagtactacaactcaagcagccccttaacacgactcgtataaatgctgctgaaatagaaagcagagttcgagaactaagcaaattagctgagaccacagataaagtcaaacaaggcttttgggaagaatttgagacactacaacaacaggagtgcaaacttctctacagccgaaaagagggtcaaaggcaagaaaacaaaaacaaaaatagatataaaaacatcctgccctttgatcataccagggttgtcctacacgatggtgatcccaatgagcctgtttcagattacatcaatgcaaatatcatcatgcctgaatttgaaaccaagtgcaacaattcaaagcccaaaaagagttacattgccacacaaggctgcctgcaaaacacggtgaatgacttttggcggatggtgttccaagaaaactcccgagtgattgtcatgacaacgaaagaagtggagagaggaaagagtaaatgtgtcaaatactggcctgatgagtatgctctaaaagaatatggcgtcatgcgtgttaggaacgtcaaagaaagcgccgctcatgactatacgctaagagaacttaaactttcaaaggttggacaagggaatacggagagaacggtctggcaataccactttcggacctggccggaccacggcgtgcccagcgaccctgggggcgtgctggacttcctggaggaggtgcaccataagcaggagagcatcatggatgcagggccggtcgtggtgcactgcaggtgacagctcctgctgcccctctaggccacagcctgtccctgtctcctagcgcccagggcttgcttttacctacccactcctagctctttaactgtaggaagaatttaatatctgtttgaggcatagagcaactgcattgagggacattttgatcccaaggcatatttctcctagaccctacagcactgccattggccatggccatggcaacatgctcagttaaaacagcaaagactaagtcagcattatctctgagtccaccagaagttgtgcattaaacaacttcatcctggaaaaaaaaaaaaaaaa

SEQ ID NO: 218 - protein, 460 aa, Homo sapiens; identical to SEQ ID NO: 216

SEQ ID NO: 219 - DNA, 506 bp, Drosophila melanogaster
gccgagtacatcaatgccaactacatacggctgcccaccgacggcgacctgtacaacatgagcagctcgtcggagagcctgaacagctcggtgccctcgtgccccgcctgcacggctgcccagacacagcggaactgctccaactgccagctgcaaaacaagacgtgcgtgcagtgcgccgtgaagagcgccattctgccgtatagcaactgtgccacctgcagccgcaagtcagactccctgagcaagcacaagcggagcgaatcctcggcctcttcatcgccctcctccggctctgggtccggaccaggatcgtcgggcaccagcggagtgagcagcgtcaatggacccggcacacccaccaatctcacgagcggcacagccggatgtctggtcggcctgctgaagagacactcgaacgactcgtccggagctgtttctatatcgatggccgaacgggaacgcgagagggagcgcgagatgtttaagacctacatcgccaccca

SEQ ID NO: 220 - DNA, 49 bp, Artificial sequence
  Primer
taatacgactcactatagggagagccgagtacatcaatgccaactacat

SEQ ID NO: 221 - DNA, 49 bp, Artificial sequence
  Primer
taatacgactcactatagggagatgggtggcgatgtaggtcttaaacat

SEQ ID NO: 222 - RNA, 21 nt, Artificial sequence
  short interfering RNA
aacgucaaagaaagcgccgcu

SEQ ID NO: 223 - RNA, 21 nt, Artificial sequence
  short interfering RNA
aauuggccggacagggacguu

SEQ ID NO: 224 - DNA, 7217 bp, Drosophila melanogaster
atgtctagccggaaggtgccaggaggctctggaggagctgacgaatccacagcagcagctgcccccctggatgataatgccaatgccagtgtggagattccagacagcagcgaggagccagcaatgggcgtcggcgaagagatgtctatcataagcaaaacacgcacctcaactttgtcagtggagcccgctaaggagccaacagtaacagcagagctggaaggcgaaaaagagctggaatcgaatccagtctccaaaactcctaggtccacgcctacgccaacccttacgccagccgtcacgcctaccgccagtgatggagtggcggccaagagcgtgagggttacccggcactcgtcgccactgcttctgatcatctcgcccacgacaagtagacgtgaggtcggcgacggagagctagacaccgaggaaccaacgggatcgggtggccaaagaaagagctccgtggagcgatctttggcgcccgttatacgcggacgaaagtccatcaaggatctgaaagaagccaaagaagtcaagtccgaggagccgcctgccgcagcatcagagtcacgagctgcaagtggagtgacgcctggccaggtcaaggaacagcatgtcgcggatggcaacgaaatggaatccttgccaatcacagacaagaaagaccacaaagacacaaaagacaagggagatgagcgggaaaccgatcaggaggaagagaaggaaaaatcagctgatacagaaataattgcagatacagaaaaaacttcggagaaacaaaagtatacagagaaggacaaagctgccgataaagatggaggaaaagaaaaagatattgatgcaaataaggatatagataaggagaaggaaaaggtcaaggaagtacttccgccagtggtgcctatagcaccagtgacacccacttgtaaccgtgtcacacgtaaatcacatgcccaggagcaggcgattaacacgcgggtcactcgcaatcgtcgccagtcctctacagttggagccaactccaccgcgtctttggtagctgcatcctcctcagtaacagagcaaccccctccatctcgcggtcgacggaagaagccagtggtggtggctcctcccttggagcctgcggtaaaacggaagcgatcgcaagatgttgaagccgactcagacgccaacaacagcacgaaatacagcaaggtggaagtggtaaagtctgaggaagctgaggcaccagaggaggactccagtgccgtgcccattaagcaggaatctgttgatggcaacgaggtcagttctatttctccaacagtcacgcccacacccacacctgcgccaacaccagctccagtcccgggcagtcgacggggtcgtgggcgcccgcagaacaggaactcctcttcgcctgcaaccacaacgcgggcaacgcggctaagcaaggcgggatcaccggttatcctgacgccagtagcccaggaaccggcgccaccgaaacggcggcgagtcggctccagcacacggaagactgtctcggccagctcgctggcacccagctcgcagggcggcgccggggatgaggactccaaggacagtatggcctcgtccatggacgacctgctgatggccgcagcagatatcaagcaggagaagctgacgcccgatttcgacgatagtttgatgccagaaggcctgccctctacttctggtgcgtcgagtgccaatggtcattcctgcaccgaaccgcttactgtggacacggaaattaatgttaagcccgctgattccaaagtaaaaccaaaggagtcaccggtggtagcagtcgaggaatctccatcacaatccgaaacgcaatctgcaaaggtgtcagcgcatgcggggaaggctccatctcttagtccagatatgataagtgaaggcgtgagcgcggtcagtgttcgaaagttttataagaagcctgagttcctggaaaacaatctgggcattgaaaaggatccggagctaggtgaaatcgttcagacggttagtaacaatgacacggaaacagatgtggagatggctgttgatggcgaggtgaatcaaccgtcaactcccaagtcgcaggataaaaagaaagaggagcaggaaaagaatcagaaatcagggctaaaggcagcaaagaaggctcctgctaagttagaacctaaagctgaagacatttctgaaattcttactgacgttcctgttgatatttcgactgaggcagtagaaattatagaagaagcagaggaagacacttgttcaaatagctcaatcaaaccaggtgagctccgactggacgagagcaacgatgaacctgaactgcttcttgaagacgccctcatagtcaatggtgatgagaatgagacaccagatcaaccggaggaaaaggaggaccaggtggagttcttccatacaggagaatacgacgactttgagcacgagattatggtggagctggcgaaggagggggtgctagatgccagcggcaatgcattaagtcagcaaaaggtagaacttgagcatcccgaggatgtaactctacacgaatcaaaaaatgacatagaagccgaagaatcggttgaacgtaagcctcttaaggacccgtcggttgcggacgaaatggaggacatgaatgaggaatcctatattgacattaaggaccagacaaatcaactgttagttgaacacttggcagaagaggccatggaagcggactgcggtcccgaggataacaaggagaacttgtccacgtctgcttcgagcaccgctgccgatggtctagatattcagttggccatcaaggaggatgacgacgaggagaaaccgcttgcagttatcgctgacgaacagaagcctgggctgctgttgaccaatgacatgaaagtggatgagaaaccaaatggcaagcaggaatcggtctgtgatgagcacgttcagctggtgccaaaccttcgtcaagaacaggaaattcacttacaaaatctgggcctactcacgcaccaggccgctgaacataggcgcaagtgtctgcttgaggcacaggcccgccaggcgcaaatgcagctccagcaacatcaccaccatcagcacaagcgacaaggagcgcgcggaggaggcagtgccactcatgtggaatccagcggtactttgaagacagtcatcaagctgaacaggagcagcaacggaggagtaagcggtagtggcggcctgcctactggtacagttatccatggaggctgtggctcctcttcagcttcttccacgtcctcctcctcggtgggcagtgccacacgtaagtcaagcgggaccttgggctcaggagcgggagcaggagctggcgttcgccggcagtcgcttaagatgacattccagaagggtcgggctcgtggtcacggtgctgcggatcgatccgccgatcagtatggcgcccacgccgaggactcctactacaccattcaaaacgagaacgaaggtgcgaaaaagtttgttgtaactactggtaataccggccgcaagactaataaccgtttcagctcaactaacaactaccactcgacggtagccttgcacggtagcaactctgcgctccagtactattcgtcccactcggaaagtcagggacagacggaccacggcttctatcagatggtcaaaaaggacgaaaaggagaagatcctcattccggaaaaggcctcctcgtttaagtttcacccagggagactgtgcgaagaccagtgctactactgtagcggaaagtttggcctctatgacaccccctgccatgttggacaaataaagtccgtggagcgccagcagaagatcctagccaacgaggagaagctcaccgtggataactgcttgtgcgacgcatgttttcgacacgtggaccgccgggcaaatgtgccatcctataagaagcgtctttccgcttcaggtcacttggagatggggtctgcagcgggatctgcactagagaaacagtttgctggcgacagcggcgtcattacggaatcgggtggcgaagctggttctacggcagctgtggccgtgcagcaacgatcttgtggcgtgaaggactgcgtcgaagcggcacgacactcgctgcggcgcaagtgcatacgcaagagagtaaagaagtatcagctcagcctggagattcccgcaggctcgtcgaacgtggggctgtgtgaggcacattacaatacggtcatccaattttccggctgcgttctttgcaagcgtagattaggcaagaaccatatgtacaacataaccacgcaggacacaattcgactggaaaaggcgctgtccgagatgggcatcccagttcagcttggcatgggcactgcagtctgcaagctgtgtcgctattttgccaaccttttgataaagccaccggatagcaccaaggcacaaaaggcggaattcgtgaagaactacagaaagaggctcctcaaggtgcataatctgcaggatggcagtcatgagctgtccgaagcggatgaagaagaggcacctaatgcaacggagacagaaaggccaacctcagacggacacgaagatcccgagatgcccatggtagcggactatgatggacctaccgactccaattccagtagttcttcgactgcagccctggacaccagcaaacaaatgtccaagcttcaggccatcctgcagcaaaatgtgggagcggatgcggcaggagctgcgggaacaggaactgttgcagcaagtcccggaggaagcggatctggggcagatatctctaacgtattgcgagggaatccgaacatttccatgcgcgaacttttccacggcgaggaagagctgggtgtgcagttcaaggtgccgttcggatgcagcagcagccagcgtactccggagggctggacacgagtgcagactttcctacaatacgatgagccgacgcgccgcctctgggaggagttgcaaaagccgtacggaaatcagagctcatttctgcgccacttgatactattagagaagtactaccgaaacggagatctcgtcctagcaccgcatgcttcctccaatgccacggtttacacagagactgttcgtcagcggctgaattcgtttgatcacggtcactgcggtggattgaacatcgcaggcagcccttcttcttcgggttccggcaagcgcagtggagttcctcaacctacgggtgccagtgtgctggccaccgccctcacaacacccttgacaagccattcatcctcctctgcatccatttcctccgaacagcattcgtcggttgatcctgtcattccgctggtagacctcaatgatgacgatgaaggcgaagatggggcaggaggagcgggcgaaagggagtcgacaaataggcagcaggacgtaatcttggaatgccttagaactgcctctgtggacaagctgactaagcagctcagctcgaatgcggtgacgattatcgcccggcccaaagacaaatcgcagctctcctgcaacagcggatcctccacgtccatttccagctcctcgtccgctatttcctcgccggaggaagtggccgtcactaaggttacagcagtcgcaccagtccagtccaaggatgcaccgccactggcgccagcaagtagcggtgttagcaacagtcgtagtatccttaaaaccaacctcttgggcatgaacaaggccgtggaactcgtgcccttaacgactgccccccacgcttacaagccaactggatgccataagcctgagaaacagcaaaagattcttgacgtggccaataagcagcccggtagccagggggaaccggtaccatcaagcgccttgcttggcctgcagtcaaagctaaagcctccaacgcatcagcagcaggtcagcggatcaggagcgggaactagtggttctcagaagccatctaatgtggcgcaattgcttagctctccaccggagctaatcagcttgcatcgacggcagaccagcggagcagcagcggggtccagcagcttccttcagggcaagaggcttcaacttccacgatctggagcagggccttcaggagcgggaacgggaacaggcgctggagcagcaggaagccgcagtgcgggtggaccaccaccgcccaatgtggtcatactgccggacgccttaaccccccaggagcgacacgagagcaagagctggaagccaacgctgataccgctggaggatcagcacaaggtgccgaacaaatcacatgctctttatcagaccgccgacggtcgaaggttgcccgccctggtgcaagtgcagtctggtggcaagccatacctcatctctatcttcgactataaccgcatgtgcatcttgcgaagggaaaagctgatgcgggaccagttgctcaagagtaacgccaagccaaagccgcagaaccagcaacagcagcagggccaaacgcaccagcagcagcagaattccgccgcatcggcggctgccttctccaacatggtgaagttggcccagcaacacacggcgcgacagcagcttcagcagctgcaacagaagccacaacagcagcaacaattgcccactttgcagccaggtggggtgcgacttgcccggctgccgcaaaaactactgatgccaccactgactaatccgcagattggcagtcaagcacccaacttacagccgttgctgtctagtacgctggataacagcaacaactgctggctgtggaaaaactttcctgatcccaatcagtatctgctaaatggaaacggagggggtgccgggagctcctccagcaagttgccacatctcacggccaaaccagccacggcaactagtagctccggagcggccaacaaatcagcaggaagcctatttaccctcaagcagcagcagcaccagcagaaactcatcgacaacgctatcatgtcaaagatacccaaaagtctgacagtaataccgcagcagatgggtggtaataccggtggcgatatggggggcagcagctcctccggcaaggactgatgacggcgaaggagggcgccatggccattagccgtagcgccggaggtaacccggcgaagtagtaggatcaacaagcaggcgacgtgcagcttaagcggcgatcttcagaacaagaggtgaccagcggcggctccatggatatcacaaactccacaattccatggctgcagtagaataagtgatacact

SEQ ID NO: 225 - protein, 2342 aa, Drosophila melanogaster
MSSRKVPGGSGGADESTAAAAPLDDNANASVEIPDSSEEPAMGVGEEMSIISKTRTSTLSVEPAKEPTVTAELEGEKELESNPVSKTPRSTPTPTLTPAVTPTASDGVAAKSVRVTRHSSPLLLIISPTTSRREVGDGELDTEEPTGSGGQRKSSVERSLAPVIRGRKSIKDLKEAKEVKSEEPPAAASESRAASGVTPGQVKEQHVADGNEMESLPITDKKDHKDTKDKGDERETDQEEEKEKSADTEIIADTEKTSEKQKYTEKDKAADKDGGKEKDIDANKDIDKEKEKVKEVLPPVVPIAPVTPTCNRVTRKSHAQEQAINTRVTRNRRQSSTVGANSTASLVAASSSVTEQPPPSRGRRKKPVVVAPPLEPAVKRKRSQDVEADSDANNSTKYSKVEVVKSEEAEAPEEDSSAVPIKQESVDGNEVSSISPTVTPTPTPAPTPAPVPGSRRGRGRPQNRNSSSPATTTRATRLSKAGSPVILTPVAQEPAPPKRRRVGSSTRKTVSASSLAPSSQGGAGDEDSKDSMASSMDDLLMAAADIKQEKLTPDFDDSLMPEGLPSTSGASSANGHSCTEPLTVDTEINVKPADSKVKPKESPVVAVEESPSQSETQSAKVSAHAGKAPSLSPDMISEGVSAVSVRKFYKKPEFLENNLGIEKDPELGEIVQTVSNNDTETDVEMAVDGEVNQPSTPKSQDKKKEEQEKNQKSGLKAAKKAPAKLEPKAEDISEILTDVPVDISTEAVEIIEEAEEDTCSNSSIKPGELRLDESNDEPELLLEDALIVNGDENETPDQPEEKEDQVEFFHTGEYDDFEHEIMVELAKEGVLDASGNALSQQKVELEHPEDVTLHESKNDIEAEESVERKPLKDPSVADEMEDMNEESYIDIKDQTNQLLVEHLAEEAMEADCGPEDNKENLSTSASSTAADGLDIQLAIKEDDDEEKPLAVIADEQKPGLLLTNDMKVDEKPNGKQESVCDEHVQLVPNLRQEQEIHLQNLGLLTHQAAEHRRKCLLEAQARQAQMQLQQHHHHQHKRQGARGGGSATHVESSGTLKTVIKLNRSSNGGVSGSGGLPTGTVIHGGCGSSSASSTSSSSVGSATRKSSGTLGSGAGAGAGVRRQSLKMTFQKGRARGHGAADRSADQYGAHAEDSYYTIQNENEGAKKFVVTTGNTGRKTNNRFSSTNNYHSTVALHGSNSALQYYSSHSESQGQTDHGFYQMVKKDEKEKILIPEKASSFKFHPGRLCEDQCYYCSGKFGLYDTPCHVGQIKSVERQQKILANEEKLTVDNCLCDACFRHVDRRANVPSYKKRLSASGHLEMGSAAGSALEKQFAGDSGVITESGGEAGSTAAVAVQQRSCGVKDCVEAARHSLRRKCIRKRVKKYQLSLEIPAGSSNVGLCEAHYNTVIQFSGCVLCKRRLGKNHMYNITTQDTIRLEKALSEMGIPVQLGMGTAVCKLCRYFANLLIKPPDSTKAQKAEFVKNYRKRLLKVHNLQDGSHELSEADEEEAPNATETERPTSDGHEDPEMPMVADYDGPTDSNSSSSSTAALDTSKQMSKLQAILQQNVGADAAGAAGTGTVAASPGGSGSGADISNVLRGNPNISMRELFHGEEELGVQFKVPFGCSSSQRTPEGWTRVQTFLQYDEPTRRLWEELQKPYGNQSSFLRHLILLEKYYRNGDLVLAPHASSNATVYTETVRQRLNSFDHGHCGGLNIAGSPSSSGSGKRSGVPQPTGASVLATALTTPLTSHSSSSASISSEQHSSVDPVIPLVDLNDDDEGEDGAGGAGERESTNRQQDVILECLRTASVDKLTKQLSSNAVTIIARPKDKSQLSCNSGSSTSISSSSSAISSPEEVAVTKVTAVAPVQSKDAPPLAPASSGVSNSRSILKTNLLGMNKAVELVPLTTAPHAYKPTGCHKPEKQQKILDVANKQPGSQGEPVPSSALLGLQSKLKPPTHQQQVSGSGAGTSGSQKPSNVAQLLSSPPELISLHRRQTSGAAAGSSSFLQGKRLQLPRSGAGPSGAGTGTGAGAAGSRSAGGPPPPNVVILPDALTPQERHESKSWKPTLIPLEDQHKVPNKSHALYQTADGRRLPALVQVQSGGKPYLISIFDYNRMCILRREKLMRDQLLKSNAKPKPQNQQQQQGQTHQQQQNSAASAAAFSNMVKLAQQHTARQQLQQLQQKPQQQQQLPTLQPGGVRLARLPQKLLMPPLTNPQIGSQAPNLQPLLSSTLDNSNNCWLWKNFPDPNQYLLNGNGGGAGSSSSKLPHLTAKPATATSSSGAANKSAGSLFTLKQQQHQQKLIDNAIMSKIPKSLTVIPQQMGGNTGGDMGGSSSSGKD

SEQ ID NO: 226 - DNA, 3774 bp, Homo sapiens
atgatgagcttcggcggcgcggacgcgctgctgggcgccccgttcgcgccgctgcatggcggcggcagcctccactacgcgctagcccgaaagggtggcgcaggcgggacgcgctccgccgctggctcctccagcggcttccactcgtggacacggacgtccgtgagctccgtgtccgcctcgcccagccgcttccgtggcgcaggcgccgcctcaagcaccgactcgctggacacgctgagcaacgggccggagggctgcatggtggcggtggccacctcacgcagtgagaaggagcagctgcaggcgctgaacgaccgcttcgccgggtacatcgacaaggtgcggcagctggaggcgcacaaccgcagcctggagggcgaggctgcggcgctgcggcagcagcaggcgggccgctccgctatgggcgagctgtacgagcgcgaggtccgcgagatgcgcggcgcggtgctgcgcctgggcgcggcgcgcggtcagctacgcctggagcaggagcacctgctcgaggacatcgcgcacgtgcgccagcgcctagacgacgaggcccggcagcgagaggaggccgaggcggcggcccgcgcgctggcgcgcttcgcgcaggaggccgaggcggcgcgcgtggacctgcagaagaaggcgcaggcgctgcaggaggagtgcggctacctgcggcgccaccaccaggaagaggtgggcgagctgctcggccagatccagggctccggcgccgcgcaggcgcagatgcaggccgagacgcgcgacgccctgaagtgcgacgtgacgtcggcgctgcgcgagattcgcgcgcagcttgaaggccacgcggtgcagagcacgctgcagtccgaggagtggttccgagtgaggctggaccgactgtcggaggcagccaaggtgaacacagacgctatgcgctcagcgcaggaggagataactgagtaccggcgtcagctgcaggccaggaccacagagctggaggcactgaaaagcaccaaggactcactggagaggcagcgctctgagctggaggaccgtcatcaggccgacattgcctcctaccaggaagccattcagcagctggacgctgagctgaggaacaccaagtgggagatggccgcccagctgcgagaataccaggacctgctcaatgtcaagatggctctggatatagagatagccgcttacagaaaactcctggaaggtgaagagtgtcggattggctttggcccaattcctttctcgcttccagaaggactccccaaaattccctctgtgtccactcacataaaggtgaaaagcgaagagaagatcaaagtggtggagaagtctgagaaagaaactgtgattgtggaggaacagacagaggagacccaagtgactgaagaagtgactgaagaagaggagaaagaggccaaagaggaggagggcaaggaggaagaagggggtgaagaagaggaggcagaagggggagaagaagaaacaaagtctcccccagcagaagaggctgcatccccagagaaggaagccaagtcaccagtaaaggaagaggcaaagtcaccggctgaggccaagtccccagagaaggaggaagcaaaatccccagccgaagtcaagtcccctgagaaggccaagtctccagcaaaggaagaggcaaagtcaccgcctgaggccaagtccccagagaaggaggaagcaaaatctccagctgaggtcaagtcccccgagaaggccaagtccccagcaaaggaagaggcaaagtcaccggctgaggccaagtctccagagaaggccaagtccccagtgaaggaagaagcaaagtcaccggctgaggccaagtccccagtgaaggaagaagcaaaatctccagctgaggtcaagtccccggaaaaggccaagtctccaacgaaggaggaagcaaagtcccctgagaaggccaagtcccctgagaaggccaagtccccagagaaggaagaggccaagtcccctgagaaggccaagtccccagtgaaggcagaagcaaagtcccctgagaaggccaagtccccagtgaaggcagaagcaaagtcccctgagaaggccaagtccccagtgaaggaagaagcaaagtcccctgagaaggccaagtccccagtgaaggaagaagcaaagtcccctgagaaggccaagtccccagtgaaggaagaagcaaagacccccgagaaggccaagtccccagtgaaggaagaagccaagtccccagagaaggccaagtccccagagaaggccaagactcttgatgtgaagtctccagaagccaagactccagcgaaggaggaagcaaggtcccctgcagacaaattccctgaaaaggccaaaagccctgtcaaggaggaggtcaagtccccagagaaggcgaaatctcccctgaaggaggatgccaaggcccctgagaaggagatcccaaaaaaggaagaggtgaagtccccagtgaaggaggaggagaagccccaggaggtgaaagtcaaagagcccccaaagaaggcagaggaagagaaagcccctgccacaccaaaaacagaggagaagaaggacagcaagaaagaggaggcacccaagaaggaggctccaaagcccaaggtggaggagaagaaggaacctgctgtcgaaaagcccaaagaatccaaagttgaagccaagaaggaagaggctgaagataagaaaaaagtccccaccccagagaaggaggctcctgccaaggtggaggtgaaggaagacgctaaacccaaagaaaagacagaggtggccaagaaggaaccagatgatgccaaggccaaggaacccagcaaaccagcagagaagaaggaggcagcaccggagaaaaaagacaccaaggaggagaaggccaagaagcctgaggagaaacccaagacagaggccaaagccaaggaagatgacaagaccctctcaaaagagcctagcaagcctaaggcagaaaaggctgaaaaatcctccagcacagaccaaaaagacagcaagcctccagagaaggccacagaagacaaggccgccaaggggaagtaaggcagggagaaaggaacatccggaacagccaaagaaactcagaagagtcccggagctcaaggatcagagtaacacaattttcactttttctgtctttatgtaagaagaaactgcttagatgacggggcctccttcttcaaacaggaatttctgttagcaatatgttagcaagagagggcactcccaggcccctgcccccatgccctccccaggcgatggacaattatgatagcttatgtagctgaatgtgatacatgccgaatgccacacgtaaacacttgactataaaaactgcccccctcctttccaaataagtgcatttattgcctctatgtgcaactgacagatgaccgcaataatgaatgagcagttagaaatacattatgcttgagatgtcttaacctattcccaaatgccttctgttttccaaaggagtggtcaagcccttgcccagagctctctattctggaagagcggtccaggtggggccgggcactggccactgaattatgccagggcgcactttccactggagttcactttcaattgcttctgtgcaataaaaccaagtgcttataaaatgaaaaaaaaaaaaaaaatgctgttattctctttccctgggaaggctgggggcagggcaggggaggtctggatgtgacaccccagactgcatgggactgagcaagcatcagt

SEQ ID NO: 227 - protein, 1026 aa, Homo sapiens
MMSFGGADALLGAPFAPLHGGGSLHYALARKGGAGGTRSAAGSSSGFHSWTRTSVSSVSASPSRFRGAGAASSTDSLDTLSNGPEGCMVAVATSRSEKEQLQALNDRFAGYIDKVRQLEAHNRSLEGEAAALRQQQAGRSAMGELYEREVREMRGAVLRLGAARGQLRLEQEHLLEDIAHVRQRLDDEARQREEAEAAARALARFAQEAEAARVDLQKKAQALQEECGYLRRHHQEEVGELLGQIQGSGAAQAQMQAETRDALKCDVTSALREIRAQLEGHAVQSTLQSEEWFRVRLDRLSEAAKVNTDAMRSAQEEITEYRRQLQARTTELEALKSTKDSLERQRSELEDRHQADIASYQEAIQQLDAELRNTKWEMAAQLREYQDLLNVKMALDIEIAAYRKLLEGEECRIGFGPIPFSLPEGLPKIPSVSTHIKVKSEEKIKVVEKSEKETVIVEEQTEETQVTEEVTEEEEKEAKEEEGKEEEGGEEEEAEGGEEETKSPPAEEAASPEKEAKSPVKEEAKSPAEAKSPEKEEAKSPAEVKSPEKAKSPAKEEAKSPPEAKSPEKEEAKSPAEVKSPEKAKSPAKEEAKSPAEAKSPEKAKSPVKEEAKSPAEAKSPVKEEAKSPAEVKSPEKAKSPTKEEAKSPEKAKSPEKAKSPEKEEAKSPEKAKSPVKAEAKSPEKAKSPVKAEAKSPEKAKSPVKEEAKSPEKAKSPVKEEAKSPEKAKSPVKEEAKTPEKAKSPVKEEAKSPEKAKSPEKAKTLDVKSPEAKTPAKEEARSPADKFPEKAKSPVKEEVKSPEKAKSPLKEDAKAPEKEIPKKEEVKSPVKEEEKPQEVKVKEPPKKAEEEKAPATPKTEEKKDSKKEEAPKKEAPKPKVEEKKEPAVEKPKESKVEAKKEEAEDKKKVPTPEKEAPAKVEVKEDAKPKEKTEVAKKEPDDAKAKEPSKPAEKKEAAPEKKDTKEEKAKKPEEKPKTEAKAKEDDKTLSKEPSKPKAEKAEKSSSTDQKDSKPPEKATEDKAAKGK

SEQ ID NO: 228 - DNA, 3511 bp, Drosophila melanogaster
cagttgtttacaatttgtcgttgagggtggattacttcgtcgcgagtttcgttcgtgcatgatgcggttgtggttgattgtatacatacatactatgcacaaatccagttctcattttgttattttacaaattctcagcgagcgcatgaactggcagcctatagcgagcagctaatcacaatatttacggcagattcgtggactcaaggaaattcagccagcagccaatcgattttctagtgttatcgaaaaacatttttcattccttcatttcgttcaactaacaatactagttactactaacaatactctgtaatagtaatagtaagaggaacaggaataggaatacacatactccaaagcgataatgagttgctacagaaaaaggcactttctattgtggctcttgcgtgctgtgtgtatgttgcacttaaccgcgagaggggcatatgccacagttgggttgcaaggagtgccgacatggatatatctcggcctcaagtcccccttcatcgagtttggcaaccaggtggagcagctggccaattccagcataccactgaacatgaccaaggacgagcaggccaatatgcatcaagagggcctacgcaagctcggtacgttcataaagccagtggacctgcgggactcggagactggcttcgtcaaggccgatctcaccaagagactggtattcgatagaccgaacaacattacatctcgccctattcacccgatacaggaggagatggatcagaagcagataatcctgctcgacgaggataccgacgagaatggcctgccagccagtctcaccgacgaggatcgcaagtttatagtgccgatggcgctcaagaatatatcgcccgatccacgctgggcggccactacaccgagtccctccgctttgcagccgaacgctaaagccatctcgaccattgtgccctcgcctctggcccaggtcgagggggatcccacgtccaacatcgatgacctgaagaagcacatactcttcttgcacaacatgaccaagaccaattcgaacttcgagtcgaaattcgttaaattcccgagcctgcaaaaggacaaggccaagacatcgggagctggcggttcgccgcccaatcccaagcggccccagcggccgattcatcagtattccgcgcccatagccccaccaacacccaaggtgcccgcgccagatggcggcggcgtaggaggagcagcttacaatcccggagagcagccaattggtggctactatcagaacgaggaactagcgaataatcaatcccttcttaaaccaacagataccgactcccatccagcggccggcggtagcagccatggccagaagaatcccagcgagccccaggtgatactgctcaacgagacactctccacggagacctcaatcgaagcggatcgcagtccatcgataaaccagcccaaggcgggatcgcctgcgcgcacaacaaagcgaccaccttgcctgcgcaatcccgagtccccgaaatgcatacgtcagcgtcggcgggaggagcaacagcggcagcgggagcgggacgagtggttccgcggtcagtcgcagtacatgcagccccggttcgagccgatcatacagacgattaacaatacgaagagatttgccgtatcaatcgagattccagactcctttaaagtatcctccgagggatcggatggggagttgctttcgcgagtcgaacgctcgcagcccagcattagtagtagtagtagtagcagtagtagcagtagtaggaaaatcatgccagactatattaaggtatccatggagaacaacacatccgtcacggattattttaagcacgacgttgtgatgacatcggcagatgtcgccagcgatagggaattccttatcaagaacatggaggagcacggaggcgctggctccgcgaacagtcatcacaatgatacgactccaactgcagacgcatattcggagacaatcgatcttaatcccaataactgctatagcgcaataggtctaagcaacagccaaaagaagcaatgtgttaagcacaccagcgtgatgccggccataagtcgtggtgcccgtgccgccatccaggagtgccagtttcagttcaagaatcgccgctggaactgcagcacaacgaacgacgagaccgtatttggtcccatgaccagcctggctgctcccgaaatggccttcatccacgccctggccgcggccacggtgaccagcttcatagctcgcgcctgccgggatggccaactggcctcctgcagctgctcccgcggcagtcgacccaaacagctccacgacgactggaagtggggcggctgtggcgacaacctggagttcgcctacaagttcgccacggacttcatcgattcgcgggagaaggaaaccaatcgcgagacgcgtggcgttaagagaaaacgcgaggagatcaacaagaatcgcatgcattccgatgacacgaatgcttttaacataggtattaaacgtaacaaaaacgtagatgctaaaaacgatacaagtttggtagtgagaaacgttaggaaaagcactgaggctgaaaacagtcacatactcaatgagaactttgatcagcacctattggaactagagcagcgcattacgaaggagatacttacatccaagatagacgaggaggagatgattaagctgcaggagaagatcaaacaggagattgtcaacaccaagttcttcaagggtgagcagcagccgcgcaagaagaagcgaaaaaaccagagagccgccgccgatgcgcccgcctatccgaggaacggcatcaaggagagctacaaggatggcggcatattgccgcgcagcacggccactgtcaaggccaggagcctgatgaacttgcacaacaacgaggccggacgtcgggcggtgatcaagaaggccaggataacgtgcaagtgccacggcgtgtccggctcctgcagcctgatcacctgctggcagcaattgtcctccatccgggagattggcgactatctgcgcgagaagtacgagggcgccaccaaggtgaagatcaacaagcgtggccgcctccagatcaaggacttgcaattcaaggtgccgaccgctcacgatcttatttacctagacgaaagtcccgactggtgccgcaatagctatgcgctgcattggccgggaacgcacggacgtgtgtgccacaaaaactcgtcgggattggagagctgtgccatcctctgctgcggccggggctataatacgaagaacattatagttaacgaacgctgcaattgcaaatttcactggtgttgccaggttaaatgtgaagtttgtacgaaggtactcgaggagcacacatgtaaatagagcgttgattgaattcgaatgtcttaatgtttgtgactaagccatgaaggaaataatcgtatttaaacagtcctctccattttaattgccattaccatacaccatcatattgcttcttcttaaaatgct

SEQ ID NO: 229 - protein, 1004 aa, Drosophila melanogaster
MSCYRKRHFLLWLLRAVCMLHLTARGAYATVGLQGVPTWIYLGLKSPFIEFGNQVEQLANSSIPLNMTKDEQANMHQEGLRKLGTFIKPVDLRDSETGFVKADLTKRLVFDRPNNITSRPIHPIQEEMDQKQIILLDEDTDENGLPASLTDEDRKFIVPMALKNISPDPRWAATTPSPSALQPNAKAISTIVPSPLAQVEGDPTSNIDDLKKHILFLHNMTKTNSNFESKFVKFPSLQKDKAKTSGAGGSPPNPKRPQRPIHQYSAPIAPPTPKVPAPDGGGVGGAAYNPGEQPIGGYYQNEELANNQSLLKPTDTDSHPAAGGSSHGQKNPSEPQVILLNETLSTETSIEADRSPSINQPKAGSPARTTKRPPCLRNPESPKCIRQRRREEQQRQRERDEWFRGQSQYMQPRFEPIIQTINNTKRFAVSIEIPDSFKVSSEGSDGELLSRVERSQPSISSSSSSSSSSSRKIMPDYIKVSMENNTSVTDYFKHDVVMTSADVASDREFLIKNMEEHGGAGSANSHHNDTTPTADAYSETIDLNPNNCYSAIGLSNSQKKQCVKHTSVMPAISRGARAAIQECQFQFKNRRWNCSTTNDETVFGPMTSLAAPEMAFIHALAAATVTSFIARACRDGQLASCSCSRGSRPKQLHDDWKWGGCGDNLEFAYKFATDFIDSREKETNRETRGVKRKREEINKNRMHSDDTNAFNIGIKRNKNVDAKNDTSLVVRNVRKSTEAENSHILNENFDQHLLELEQRITKEILTSKIDEEEMIKLQEKIKQEIVNTKFFKGEQQPRKKKRKNQRAAADAPAYPRNGIKESYKDGGILPRSTATVKARSLMNLHNNEAGRRAVIKKARITCKCHGVSGSCSLITCWQQLSSIREIGDYLREKYEGATKVKINKRGRLQIKDLQFKVPTAHDLIYLDESPDWCRNSYALHWPGTHGRVCHKNSSGLESCAILCCGRGYNTKNIIVNERCNCKFHWCCQVKCEVCTKVLEEHTCK

SEQ ID NO: 230 - DNA, 4114 bp, Homo sapiens
attaattctggctccacttgttgctcggcccaggttggggagaggacggagggtggccgcagcgggttcctgagtgaattacccaggagggactgagcacagcaccaactagagaggggtcagggggtgcgggactcgagcgagcaggaaggaggcagcgcctggcaccagggctttgactcaacagaattgagacacgtttgtaatcgctggcgtgccccgcgcacaggatcccagcgaaaatcagatttcctggtgaggttgcgtgggtggattaatttggaaaaagaaactgcctatatcttgccatcaaaaaactcacggaggagaagcgcagtcaatcaacagtaaacttaagagacccccgatgctcccctggtttaacttgtatgcttgaaaattatctgagagggaataaacatcttttccttcttccctctccagaagtccattggaatattaagcccaggagttgctttggggatggctggaagtgcaatgtcttccaagttcttcctagtggctttggccatatttttctccttcgcccaggttgtaattgaagccaattcttggtggtcgctaggtatgaataaccctgttcagatgtcagaagtatatattataggagcacagcctctctgcagccaactggcaggactttctcaaggacagaagaaactgtgccacttgtatcaggaccacatgcagtacatcggagaaggcgcgaagacaggcatcaaagaatgccagtatcaattccgacatcgacggtggaactgcagcactgtggataacacctctgtttttggcagggtgatgcagataggcagccgcgagacggccttcacatacgccgtgagcgcagcaggggtggtgaacgccatgagccgggcgtgccgcgagggcgagctgtccacctgcggctgcagccgcgccgcgcgccccaaggacctgccgcgggactggctctggggcggctgcggcgacaacatcgactatggctaccgctttgccaaggagttcgtggacgcccgcgagcgggagcgcatccacgccaagggctcctacgagagtgctcgcatcctcatgaacctgcacaacaacgaggccggccgcaggacggtgtacaacctggctgatgtggcctgcaagtgccatggggtgtccggctcatgtagcctgaagacatgctggctgcagctggcagacttccgcaaggtgggtgatgccctgaaggagaagtacgacagcgcggcggccatgcggctcaacagccggggcaagttggtacaggtcaacagccgcttcaactcgcccaccacacaagacctggtctacatcgaccccagccctgactactgcgtgcgcaatgagagcaccggctcgctgggcacgcagggccgcctgtgcaacaagacgtcggagggcatggatggctgcgagctcatgtgctgcggccgtgggtacgaccagttcaagaccgtgcagacggagcgctgccactgcaagttccactggtgctgctacgtcaagtgcaagaagtgcacggagatcgtggaccagtttgtgtgcaagtagtgggtgccacccagcactcagccccgctcccaggacccgcttatttatagaaagtacagtgattctggtttttggtttttagaaatattttttatttttccccaagaattgcaaccggaaccattttttttcctgttaccatctaagaactctgtggtttattattaatattataattattatttggcaataatgggggtgggaaccacgaaaaatatttattttgtggatctttgaaaaggtaatacaagacttcttttggatagtatagaatgaagggggaaataacacataccctaacttagctgtgtgggacatggtacacatccagaaggtaaagaaatacattttctttttctcaaatatgccatcatatgggatgggtaggttccagttgaaagagggtggtagaaatctattcacaattcagcttctatgaccaaaatgagttgtaaattctctggtgcaagataaaaggtcttgggaaaacaaaacaaaacaaaacaaacctcccttccccagcagggctgctagcttgctttctgcattttcaaaatgataatttacaatggaaggacaagaatgtcatattctcaaggaaaaaaggtatatcacatgtctcattctcctcaaatattccatttgcagacagaccgtcatattctaatagctcatgaaatttgggcagcagggaggaaagtccccagaaattaaaaaatttaaaactcttatgtcaagatgttgatttgaagctgttataagaattgggattccagatttgtaaaaagacccccaatgattctggacactagattttttgtttggggaggttggcttgaacataaatgaaatatcctgtattttcttagggatacttggttagtaaattataatagtagaaataatacatgaatcccattcacaggtttctcagcccaagcaacaaggtaattgcgtgccattcagcactgcaccagagcagacaacctatttgaggaaaaacagtgaaatccaccttcctcttcacactgagccctctctgattcctccgtgttgtgatgtgatgctggccacgtttccaaacggcagctccactgggtcccctttggttgtaggacaggaaatgaaacattaggagctctgcttggaaaacagttcactacttagggatttttgtttcctaaaacttttattttgaggagcagtagttttctatgttttaatgacagaacttggctaatggaattcacagaggtgttgcagcgtatcactgttatgatcctgtgtttagattatccactcatgcttctcctattgtactgcaggtgtaccttaaaactgttcccagtgtacttgaacagttgcatttataaggggggaaatgtggtttaatggtgcctgatatctcaaagtcttttgtacataacatatatatatatatacatatatataaatataaatataaatatatctcattgcagccagtgatttagatttacagcttactctggggttatctctctgtctagagcattgttgtccttcactgcagtccagttgggattattccaaaagttttttgagtcttgagcttgggctgtggccccgctgtgatcataccctgagcacgacgaagcaacctcgtttctgaggaagaagcttgagttctgactcactgaaatgcgtgttgggttgaagatatctttttttcttttctgcctcacccctttgtctccaacctccatttctgttcactttgtggagagggcattacttgttcgttatagacatggacgttaagagatattcaaaactcagaagcatcagcaatgtttctcttttcttagttcattctgcagaatggaaacccatgcctattagaaatgacagtacttattaattgagtccctaaggaatattcagcccactacatagatagctttttttttttttttttttttttaataaggacacctctttccaaacaggccatcaaatatgttcttatctcagacttacgttgttttaaaagtttggaaagatacacatcttttcatacccccccttaggaggttgggctttcatatcacctcagccaactgtggctcttaatttattgcataatgatatccacatcagccaactgtggctctttaatttattgcataatgatattcacatcccctcagttgcagtgaattgtgagcaaaagatcttgaaagcaaaaagcactaattagtttaaaatgtcacttttttggtttttattatacaaaaaccatgaagtactttttttatttgctaaatcagattgttcctttttagtgactcatgtttatgaagagagttgagtttaacaatcctagcttttaaaagaaactatttaatgtaaaatattctacatgtcattcagatattatgtatatcttctagcctttattctgtacttttaatgtacatatttctgtcttgcgtgatttgtatatttcactggtttaaaaaacaaacatcgaaaggcttattccaaatggaag

SEQ ID NO: 231 - protein, 365 aa, Homo sapiens
MAGSAMSSKFFLVALAIFFSFAQVVIEANSWWSLGMNNPVQMSEVYIIGAQPLCSQLAGLSQGQKKLCHLYQDHMQYIGEGAKTGIKECQYQFRHRRWNCSTVDNTSVFGRVMQIGSRETAFTYAVSAAGVVNAMSRACREGELSTCGCSRAARPKDLPRDWLWGGCGDNIDYGYRFAKEFVDARERERIHAKGSYESARILMNLHNNEAGRRTVYNLADVACKCHGVSGSCSLKTCWLQLADFRKVGDALKEKYDSAAAMRLNSRGKLVQVNSRFNSPTTQDLVYIDPSPDYCVRNESTGSLGTQGRLCNKTSEGMDGCELMCCGRGYDQFKTVQTERCHCKFHWCCYVKCKKCTEIVDQFVCK

SEQ ID NO: 232 - DNA, 348 bp, Drosophila melanogaster
atgggttgcacctgctgtgacaataaacccaagccggagaccattgagatatattcggtgaaaatccgtgagaatggtacatacaagttgatcaagatgcaattggcggatatttggagtcacggatgggagctgcgtatcaataactttgccgacaaggaaaaggtgccgcacaacgagaaggatattcgcaatcaggtgtcggtggcgcgcaaagccaaacagagtctgtggaacaataataagcattttgtgtactggtgccgctacggaagtcgtcagcaggatctgcgaaagcgacaggtaacgacgagtgccaatcacgtgctgctgcacctgatcaattga

SEQ ID NO: 233 - protein, 115 aa, Drosophila melanogaster
MGCTCCDNKPKPETIEIYSVKIRENGTYKLIKMQLADIWSHGWELRINNFADKEKVPHNEKDIRNQVSVARKAKQSLWNNNKHFVYWCRYGSRQQDLRKRQVTTSANHVLLHLIN

SEQ ID NO: 234 - DNA, 1059 bp, Drosophila melanogaster
ccatttgaaagtatcggtgtaatttgttttcagagaaattaatttccgtttactgtgcaattcggtgtgaaagtgttcagatttatcaatgcgtattctgctttcgacttcgccaccaatctgtgctgcaagttaccattaccaggtccacctggttcccgccagttttctttcattgtggctagttgttgttcgtgccttcgataaagacgtttagaggtgtttttagagtttcgccatctggtcactatagccgtttcgttttttacatgcccagcatcaagttgcaatcttcggatgaggagatctttgacacggatatccagatcgccaagtgctccggcactatcaagaccatgctggaggactgcggcatggaggacgatgagaatgccattgtgccgttgcccaatgtgaattcgacgattcttcgcaaggtgcttacctgggctcactaccacaaggacgacccccagccaacggaggatgatgagagcaaggagaagcgcacagacgacattatctcatgggatgcagatttcctaaaagtcgaccagggcacactgtttgagctgatattggcagcgaactatctggacattaagggccttctggagctcacctgcaagactgttgcaaacatgattaagggaaagactcccgaggaaatacgcaagaccttcaacattaagaaggacttttcgcccgccgaggaggagcaggtgcgcaaggagaacgagtggtgcgaggagaagtaaagcgcggcatttcgcgggaccaacattaagttgaaacagctaggggattcgggaacgaattggatttgcagcattgcaactttacttagttgctactttcatttacatttttttttatttttaaccccagcagagactcgatttaaattgtgtataaatgatctgttgctgatttgattcgcggggttcattttttgtcgtaaatatatctcatatacatacatatgcgagattgtaacactctctttaacctattggagtaacacttgatttcactttaataaatataactacccaacac

SEQ ID NO: 235 - protein, 162 aa, Drosophila melanogaster
MPSIKLQSSDEEIFDTDIQIAKCSGTIKTMLEDCGMEDDENAIVPLPNVNSTILRKVLTWAHYHKDDPQPTEDDESKEKRTDDIISWDADFLKVDQGTLFELILAANYLDIKGLLELTCKTVANMIKGKTPEEIRKTFNIKKDFSPAEEEQVRKENEWCEEK

SEQ ID NO: 236 - DNA, 929 bp, Drosophila melanogaster
tttcgccatctggtcactatagccgtttcgttttttacgtgagtattgtgaatttggtgtgttgatttatatctcagttggagcctgcgtggaaatagtgtcagtacgtttaaaggcatcatcgtaaggaaagcccaaaatgcccagcatcaagttgcaatcttcggatgaggagatctttgacacggatatccagatcgccaagtgctccggcactatcaagaccatgctggaggactgcggcatggaggacgatgagaatgccattgtgccgttgcccaatgtgaattcgacgattcttcgcaaggtgcttacctgggctcactaccacaaggacgacccccagccaacggaggatgatgagagcaaggagaagcgcacagacgacattatctcatgggatgcagatttcctaaaagtcgaccagggcacactgtttgagctgatattggcagcgaactatctggacattaagggccttctggagctcacctgcaagactgttgcaaacatgattaagggaaagactcccgaggaaatacgcaagaccttcaacattaagaaggacttttcgcccgccgaggaggagcaggtgcgcaaggagaacgagtggtgcgaggagaagtaaagcgcggcatttcgcgggaccaacattaagttgaaacagctaggggattcgggaacgaattggatttgcagcattgcaactttacttagttgctactttcatttacatttttttttatttttaaccccagcagagactcgatttaaattgtgtataaatgatctgttgctgatttgattcgcggggttcattttttgtcgtaaatatatctcatatacatacatatgcgagattgtaacactctctttaacctattggagtaacacttgatttcactttaataaatataactacccaacac

SEQ ID NO: 237 - protein, 162 aa, Drosophila melanogaster; identical to SEQ ID NO: 235

SEQ ID NO: 238 - DNA, 879 bp, Drosophila melanogaster
aaacatcgaaagtgcacaatcgtttgttatctttgtacgaaaacaacggtgatttccacacaggcataacctgcaagagaaagcccaaaatgcccagcatcaagttgcaatcttcggatgaggagatctttgacacggatatccagatcgccaagtgctccggcactatcaagaccatgctggaggactgcggcatggaggacgatgagaatgccattgtgccgttgcccaatgtgaattcgacgattcttcgcaaggtgcttacctgggctcactaccacaaggacgacccccagccaacggaggatgatgagagcaaggagaagcgcacagacgacattatctcatgggatgcagatttcctaaaagtcgaccagggcacactgtttgagctgatattggcagcgaactatctggacattaagggccttctggagctcacctgcaagactgttgcaaacatgattaagggaaagactcccgaggaaatacgcaagaccttcaacattaagaaggacttttcgcccgccgaggaggagcaggtgcgcaaggagaacgagtggtgcgaggagaagtaaagcgcggcatttcgcgggaccaacattaagttgaaacagctaggggattcgggaacgaattggatttgcagcattgcaactttacttagttgctactttcatttacatttttttttatttttaaccccagcagagactcgatttaaattgtgtataaatgatctgttgctgatttgattcgcggggttcattttttgtcgtaaatatatctcatatacatacatatgcgagattgtaacactctctttaacctattggagtaacacttgatttcactttaataaatataactacccaacac

SEQ ID NO: 239 - protein, 162 aa, Drosophila melanogaster; identical to SEQ ID NO: 235

SEQ ID NO: 240 - DNA, 576 bp, Homo sapiens
gcctcccagctctcgtcagcctcctgctggccatctccttaacaccaaacactatgccttcaattcagttgcagagttttgatggagagatatttgcagttgatgtggaaattgccaaacaatctgtgactatcaagaccacgttggaagatttgggaatggatgatgaaggagatgacccagttcctctaccaaatgtgaatgcagcagtattaaaaaaggtcattcagtggtgcacccaccacaaggatgaccctcctccccctgaagatgatgagaacaaagaaaagcaaacagacgatatccctgtttgggaccaagaattcctgaaagttgctcaaggaacactttttgaactcattcgggctgcaaactacttagacatcaaaggtttgcttgatgttacatgcaagactgttgccaatatgatcaaggggaaaactcctgaggagattcgcaagacattcaatatcaaaaatgactttactgaagaggaggaagcccaggtacgcaaagagaaccagtggtgtgaagagaagtgaaatgttgtgcctgacactgtaacactgtaaggat

SEQ ID NO: 241 - protein, 162 aa, Homo sapiens [sequence omitted]

SEQ ID NO: 242 - DNA, 1872 bp, Drosophila melanogaster
ttagtcacagcaacgcacacacacactaccaaacggctacattttttttcgagtgtgttcgacattcataatttttgtggtggagctgcctgcaaaatcgaattttatcagtttgccaacgaagttatcggccataactgcaaataaagttcagcaataacttggcgctgttacgatctcaacgagaaggtccagactcaacccgcgtttccagttcaccgcgtaaaaggaaccagctaaacgatgtccagcctgccacgtcgcatcatcaaggagactcaacgtttgatgcaggagccagtgcctgggatcaatgccattcccgatgagaacaatgcccgttacttccatgtgatcgtgaccggaccgaacgattcgcccttcgagggcggcgtgttcaagctggagctgttcctaccggaggactatccaatgtcagcgcccaaagtgcgcttcatcacgaagatctaccatccgaacatcgatcgtttgggccgcatttgcctcgacgtgctgaaggacaagtggagtccagccctgcagatccggaccatattgctatccattcaggcactgctcagtgcacccaatcccgacgatccgctggccaacgatgtggctgagttgtggaaggtcaacgaggcggaggccattcgcaatgcccgcgagtggacccagaaatatgccgtcgaagactgaacgcccgaggtcaggaggaaagtcagaaagcggatccgtcagttgtatcggcgtttttccagaaagtgggtgcgtgacatgaacgggcgggtgggtaaattgaatactttaaaagcaaccagaaaaacctaaaacatacgaaagaaaacataaaataagaaaaaagtaaggaagcaaacataaaaaaaaacgatttaagaacacatttttttttcgaaccttctggggcgggatatacatataaaatattaatatatatatttttttcaaccaatcgatcggggcgatcggcgaaatggaggagagatagcgaaagcattctttatgtaagacgtatacatgtatccgaaacaaactaaaaacgaaaaaaaaaaaaaaaaaaaaaaacagtaattggttttagtcgtttctattgatttgttcgagggttctggtgtctatatacatatagccgtatataattctatgtgtaactgaaataaccaacccataaccattaacacatgtagcatcagatatgataaatcaattggaaaggcaaacaagaagggattttgatttcctttaactcgtcatttgaaaactcggcttaaatgtcaattcaaaatagagaattttgattgtatcattttcagtgtttcagaaaatttaagatgtgatcgtccaacttgtagactttacttttcttaactaagagttcaccatttcgattgatacttgagctttgcctgggttgtgtcagagtccctttgataaacgataaatagtttttactcgaaaacaattttttttaaccaaacaatgaagcctttaagctattagtaatttttgaaaaaaaaaaaaataaaaaatatatatataaaaaatatacaaaaatatgatacatgatcaaaatacaatgaatgcatacactatatatttatacaaaaaaaatacaaaaagaaaaacaaaagtagtggcttgattgcgtgaaaatttcaagtgcagttctcaacaaaaattgtgtacagtaattaaatgtttgtcaccgaaatcactaaaggataatccaaaaaacaatagcaaccgaaaagcaaccataaatcaaagagtaagcgaaaataaaaattcagttttctttaattttaattaatttttttctaagaaaaataaataaaaacgaaaaattcaaat

SEQ ID NO: 243 - protein, 151 aa, Drosophila melanogaster
MSSLPRRIIKETQRLMQEPVPGINAIPDENNARYFHVIVTGPNDSPFEGGVFKLELFLPEDYPMSAPKVRFITKIYHPNIDRLGRICLDVLKDKWSPALQIRTILLSIQALLSAPNPDDPLANDVAELWKVNEAEAIRNAREWTQKYAVED

SEQ ID NO: 244 - DNA, 1203 bp, Homo sapiens
actcgtgcgtgaggcgagaggagccggagacgagaccagaggccgaactcgggttctgacaagatggccgggctgccccgcaggatcatcaaggaaacccagcgtttgctggcagaaccagttcctggcatcaaagccgaaccagatgagagcaacgcccgttattttcatgtggtcattgctggccctcaggattccccctttgagggagggacttttaaacttgaactattccttccagaagaatacccaatggcagcccctaaagtacgtttcatgaccaaaatttatcatcctaatgtagacaagttgggaagaatatgtttagatattttgaaagataagtggtccccagcactgcagatccgcacagttctgctatcgatccaggccttgttaagtgctcccaatccagatgatccattagcaaatgatgtagcggagcagtggaagaccaacgaagcccaagccatagaaacagctagagcatggactaggctatatgccatgaataatatttaaattgatacgatcatcaagtgtgcatcacttctcctgttctgccaagacttcctcctctttgtttgcatttaatggacacagtcttagaaacattacagaataaaaaagcccagacatcttcagtcctttggtgattaaatgcacattagcaaatctatgtcttgtcctgattcactgtcataaagcatgagcagaggctagaagtatcatctggattgttgtgaaacgtttaaaagcagtggcccctccctgcttttattcatttcccccatcctggtttaagtataaagcactgtgaatgaaggtagttgtcaggttagctgcaggggtgtgggtgtttttattttattttattttattttatttttgaggggggaggtagtttaattttatgggctcctttcccccttttttggtgatctaattgcattggttaaaagcagctaaccaggtctttagaatatgctctagccaagtctaactttatttagacgctgtagatggacaagcttgattgttggaaccaaaatgggaacattaaacaaacatcacagccctcactaataacattgctgtcaagtgtagattccccccttcaaaaaaagcttgtgaccattttgtatggcttgtctggaaacttctgtaaatcttatgttttagtaaaatattttttgttattct

SEQ ID NO: 245 - protein, 152 aa, Homo sapiens
MAGLPRRIIKETQRLLAEPVPGIKAEPDESNARYFHVVIAGPQDSPFEGGTFKLELFLPEEYPMAAPKVRFMTKIYHPNVDKLGRICLDILKDKWSPALQIRTVLLSIQALLSAPNPDDPLANDVAEQWKTNEAQAIETARAWTRLYAMNNI

SEQ ID NO: 246 - DNA, 1927 bp, Drosophila melanogaster
tcgcagaaccgaacacgtcagctacggggattgattgttaaacaacgtttctatcgccccgcaaatccgatccgtagcagcagtccatcctgcgccgtccgcatccgatccgcgaagtattttccagggcaaaaacgtcaaacgcagcagcaaaatggtattaattgctgcggctgtctgcacgaagaatggcaaagtgattctgtcacgtcagttcgtcgagatgacgaaggcacgcatcgagggactgctggctgcctttcccaagctgatgactgctggcaagcagcacacttacgtggagacggactccgtgcgctacgtctaccagccgatggagaaactatatatgctgctcatcaccactaaggccagcaacattctggaggatctggagaccctgcgcctcttctcgaaagtgattcccgagtacagccactcgctcgacgagaaggagattgtggagaatgccttcaatctgatcttcgcatttgacgagatcgtggcactcggctacagggagagcgtcaacttggcccagatcaagaccttcgtggagatggactcacatgaggagaaggtctaccaggcagtgcgtcagacgcaggagcgtgatgcgcgccagaagatgcgcgagaaggccaaggaactgcagcggcagcgcatggaggccagcaaacggggtggtccctccctgggtggcattggcagccgcagcggcggctttagcgccgacggaattggcagtagcggcgtgagcagcagttccggtgcctccagcgccaacaccggcatcacctccatcgatgtggacaccaaatccaaggcggctgccagtaaaccagcttcccgcaatgccctcaagctaggtggcaagtccaaggacgtcgatagtttcgtggatcagctgaagaacgagggcgagaagattgccaatctggcaccggcggcgcccgctggaggttccagtgctgcagctagcgccagtgcagcggccaaggcagctatcgcgtcggacattcacaaagagagcgtacatctgaagattgaggacaagctagtagtgcgtctgggacgcgatggtggcgtgcagcagttcgagaactcgggcctcctgacgttgcgcattacggacgaggcctacggacgcattttgctgaagctgtctcccaaccacacacagggcctgcagttgcagacccaccccaacgtggacaaggagctgttcaagtcgcgcactaccatcggactaaagaacttgggcaagccgtttccccttaacaccgatgtgggtgtgctcaagtggcgcttcgtctcgcaggacgagtcggcagtcccgctgaccattaactgctggccatcggataatggagagggtggatgcgatgttaacattgagtatgaactggaggcgcagcagctagagctgcaggacgtggccattgtcattcccttgccaatgaatgtgcagccttcggtggcggagtacgacggcacctacaactacgattcacgcaagcatgtgctccagtggcacattccaataatcgatgccgccaacaagtccggttctatggagttcagctgcagtgcctccattcccggtgacttcttccccttgcaggtgtccttcgtctcgaaaacgccgtatgcgggcgtcgtggcccaggatgtggtgcaggtggacagcgaggcggcggtcaagtattcaagcgagtccattctgttcgtggaaaagtacgagatcgtgtaggccgcgccgctggccacgcccacctaagtagtacataaatatacataatttcccggggtcatccgatgcgatgcaattaattcaactgctgcagcatgttgagaattatttttccatgtgcgaactttacatatttatggcgcagacagcttctcagagcgagtaattgattcc

SEQ ID NO: 247 - protein, 532 aa, Drosophila melanogaster
MVLIAAAVCTKNGKVILSRQFVEMTKARIEGLLAAFPKLMTAGKQHTYVETDSVRYVYQPMEKLYMLLITTKASNILEDLETLRLFSKVIPEYSHSLDEKEIVENAFNLIFAFDEIVALGYRESVNLAQIKTFVEMDSHEEKVYQAVRQTQERDARQKMREKAKELQRQRMEASKRGGPSLGGIGSRSGGFSADGIGSSGVSSSSGASSANTGITSIDVDTKSKAAASKPASRNALKLGGKSKDVDSFVDQLKNEGEKIANLAPAAPAGGSSAAASASAAAKAAIASDIHKESVHLKIEDKLVVRLGRDGGVQQFENSGLLTLRITDEAYGRILLKLSPNHTQGLQLQTHPNVDKELFKSRTTIGLKNLGKPFPLNTDVGVLKWRFVSQDESAVPLTINCWPSDNGEGGCDVNIEYELEAQQLELQDVAIVIPLPMNVQPSVAEYDGTYNYDSRKHVLQWHIPIIDAANKSGSMEFSCSASIPGDFFPLQVSFVSKTPYAGVVAQDVVQVDSEAAVKYSSESILFVEKYEIV

SEQ ID NO: 248 - DNA, 1998 bp, Homo sapiens
cgggcggttcctgtcaagggggcagcaggtccagagctgctggtgctcccgttccccagaccctacccctatccccagtggagccggagtgcggcgcgccccaccaccgccctcaccatggtgctgttggcagcagcggtctgcacaaaagcaggaaaggctattgtttctcgacagtttgtggaaatgacccgaactcggattgagggcttattagcagcttttccaaagctcatgaacactggaaaacaacatacgtttgttgaaacagagagtgtaagatatgtctaccagcctatggagaaactgtatatggtactgatcactaccaaaaacagcaacattttagaagatttggagaccctaaggctcttctcaagagtgatccctgaatattgccgagccttagaagagaatgaaatatctgagcactgttttgatttgatttttgcttttgatgaaattgtcgcactgggataccgggagaatgttaacttggcacagatcagaaccttcacagaaatggattctcatgaggagaaggtgttcagagccgtcagagagactcaagaacgtgaagctaaggctgagatgcgtcgtaaagcaaaggaattacaacaggcccgaagagatgcagagagacagggcaaaaaagcaccaggatttggcggatttggcagctctgcagtatctggaggcagcacagctgccatgatcacagagaccatcattgaaactgataaaccaaaagtggcacctgcaccagccaggccttcaggccccagcaaggctttaaaacttggagccaaaggaaaggaagtagataactttgtggacaaattaaaatctgaaggtgaaaccatcatgtcctctagtatgggcaagcgtacttctgaagcaaccaaaatgcatgctccacccattaatatggaaagtgtacatatgaagattgaagaaaagataacattaacctgtggacgagacggaggattacagaatatggagttgcatggcatgatcatgcttaggatctcagatgacaagtatggccgaattcgtcttcatgtggaaaatgaagataagaaaggggtgcagctacagacccatccaaatgtggataaaaaacttttcactgcagagtctctaattggcctgaagaatccagagaagtcatttccagtcaacagtgacgtaggggtgctaaagtggagactacaaaccacagaggaatcttttattccactgacaattaattgctggccctcggagagtggaaatggctgtgatgtcaacatagaatatgagctacaagaagataatttagaactgaatgatgtggttatcaccatcccactcccgtctggtgtcggcgcgcctgttatcggtgagatcgatggggagtatcgacatgacagtcgacgaaataccctggagtggtgcctgcctgtgattgatgccaaaaataagagtggcagcctggagtttagcattgctgggcagcccaatgacttcttccctgttcaagtttcctttgtctccaagaaaaattactgtaacatacaggttaccaaagtgacccaggtagatggaaacagccccgtcaggttttccacagagaccactttcctagtggataagtatgaaatcctgtaataccaagaagagggagctgaaaaggaaaattttcagattaataaagaagacgccaatgatggctgaagagtttttcccagatttacaagccactggagaccccttttttctgatacaatgcacgattctctgcgcgcaaggaccctcgactcacccccatgtttcagtgtcacagagacattctttgataaggaaatggcacaaacataaagggaaaggctgctaattttctttggcagattgtattggccagcaggaaagcaagctctccagagaatgcccccagttaaatacctcctctacctttacctaagttgctcctttatttttattttataataataa

SEQ ID NO: 249 - protein, 511 aa, Homo sapiens
MVLLAAAVCTKAGKAIVSRQFVEMTRTRIEGLLAAFPKLMNTGKQHTFVETESVRYVYQPMEKLYMVLITTKNSNILEDLETLRLFSRVIPEYCRALEENEISEHCFDLIFAFDEIVALGYRENVNLAQIRTFTEMDSHEEKVFRAVRETQEREAKAEMRRKAKELQQARRDAERQGKKAPGFGGFGSSAVSGGSTAAMITETIIETDKPKVAPAPARPSGPSKALKLGAKGKEVDNFVDKLKSEGETIMSSSMGKRTSEATKMHAPPINMESVHMKIEEKITLTCGRDGGLQNMELHGMIMLRISDDKYGRIRLHVENEDKKGVQLQTHPNVDKKLFTAESLIGLKNPEKSFPVNSDVGVLKWRLQTTEESFIPLTINCWPSESGNGCDVNIEYELQEDNLELNDVVITIPLPSGVGAPVIGEIDGEYRHDSRRNTLEWCLPVIDAKNKSGSLEFSIAGQPNDFFPVQVSFVSKKNYCNIQVTKVTQVDGNSPVRFSTETTFLVDKYEIL

SEQ ID NO: 250 - DNA, 1515 bp, Drosophila melanogaster
atgcgttatgacgcctccgccgctttcgtgatgcccttcatggcacatgaccgattccaggacttttacacgcgcatggatgtgcccgagatccggcagtatatgcgcaatctcctggtggcactgcgtcatgtccacaagttcgatgtcatccatcgcgacgtgaagccgagcaactttctctacaatcgacgtcggcgagagtttctcctcgtcgatttcggtctggcccagcatgtgaatcctccggctgcgcgatcttccggaagtgccgccgccatcgccgcagccaacaacaaaaacaacaacaataataacaataataatagcaaacggccacgagagcgcgaatcaaagggggatgtgcagcaaattgcgctggatgctggtttgggtggagcagtgaagcgtatgcgtttgcacgaggagtccaacaagatgcccctgaaaccggtcaacgatattgcgccaagcgatgcgccggagcagtcagtagatgggtccaatcacgtccagccacagctagtgcagcaagagcagcaacaactgcagccgcaacagcagcagcaacaacagcagcagcaacaacagtcgcaacagcagcagcagccgcagcagcagtcgcaacagcagcacccacaacgacagccacaactggcgcagatggatcaaacagcatcgacgccatctggcagcaagtacaatacgaatcgaaatgtctcggcagcagcggctaataatgccaagtgcgtttgctttgcaaatccctcagtttgcctcaactgtctgatgaagaaggaggtgcacgcctccagggcaggaacacctggctatcggccgcccgaggttctgctcaagtacccagatcagaccactgccgtggacgtttgggcggcgggtgtgatattcctttcgatcatgtcaacggtgtatccgtttttcaaagcgcccaacgattttatcgcgctggccgagattgtaacaatatttggagatcaggcgatacggaagacggccttggctctcgaccgtatgatcaccctgagccagaggtccaggccactgaatctgcgaaagttgtgcctgcgctttcgctatcgttccgtttttagtgatgccaagctcctcaagagctacgaatctgtggacggaagctgcgaagtgtgccggaattgtgatcaatacttcttcaactgcctatgcgaggatagcgattacttgacagagccactggacgcatacgaatgttttccacccagcgcctatgacctactggatcgcctgctcgagattaatccccataaacgaattaccgccgaagaggcactaaagcatccattctttacggccgccgaggaggccgagcagacggagcaggatcagttggccaatggaacgccgcgcaagatgcgtcgacaaagatatcaaagtcacagaacggtggccgcctcacaggagcaggtcaagcagcaggttgcccttgatctgcagcaagcggccattaacaagctgtga

SEQ ID NO: 251 - protein, 504 aa, Drosophila melanogaster
MRYDASAAFVMPFMAHDRFQDFYTRMDVPEIRQYMRNLLVALRHVHKFDVIHRDVKPSNFLYNRRRREFLLVDFGLAQHVNPPAARSSGSAAAIAAANNKNNNNNNNNNSKRPRERESKGDVQQIALDAGLGGAVKRMRLHEESNKMPLKPVNDIAPSDAPEQSVDGSNHVQPQLVQQEQQQLQPQQQQQQQQQQQQSQQQQQPQQQSQQQHPQRQPQLAQMDQTASTPSGSKYNTNRNVSAAAANNAKCVCFANPSVCLNCLMKKEVHASRAGTPGYRPPEVLLKYPDQTTAVDVWAAGVIFLSIMSTVYPFFKAPNDFIALAEIVTIFGDQAIRKTALALDRMITLSQRSRPLNLRKLCLRFRYRSVFSDAKLLKSYESVDGSCEVCRNCDQYFFNCLCEDSDYLTEPLDAYECFPPSAYDLLDRLLEINPHKRITAEEALKHPFFTAAEEAEQTEQDQLANGTPRKMRRQRYQSHRTVAASQEQVKQQVALDLQQAAINKL

SEQ ID NO: 252 - DNA, 1725 bp, Homo sapiens
atggaggcgtctttggggattcagatggatgagccaatggctttttctccccagcgtgaccggtttcaggctgaaggctctttaaaaaaaaacgagcagaattttaaacttgcaggtgttaaaaaagatattgagaagctttatgaagctgtaccacagcttagtaatgtgtttaagattgaggacaaaattggagaaggcactttcagctctgtttatttggccacagcacagttacaagtaggacctgaagagaaaattgctgtaaaacacttgattccaacaagtcatcctataagaattgcagctgaacttcagtgcctaacagtggctggggggcaagataatgtcatgggagttaaatactgctttaggaagaatgatcatgtagttattgctatgccatatctggagcatgagtcgtttttggacattctgaattctctttcctttcaagaagtacgggaatatatgcttaatctgttcaaagctttgaaacgcattcatcagtttggtattgttcaccgtgatgttaagcccagcaattttttatataataggcgcctgaaaaagtatgccttggtagactttggtttggcccaaggaacccatgatacgaaaatagagcttcttaaatttgtccagtctgaagctcagcaggaaaggtgttcacaaaacaaatcccacataatcacaggaaacaagattccactgagtggcccagtacctaaggagctggatcagcagtccaccacaaaagcttctgttaaaagaccctacacaaatgcacaaattcagattaaacaaggaaaagacggaaaggagggatctgtaggcctttctgtccagcgctctgtttttggagaaagaaatttcaatatacacagctccatttcacatgagagccctgcagtgaaactcatgaagcagtcaaagactgtggatgtactgtctagaaagttagcaacaaaaaagaaggctatttctacgaaagttatgaatagtgctgtgatgaggaaaactgccagttcttgcccagctagcctgacctgtgactgctatgcaacagataaagtttgtagtatttgcctttcaaggcgtcagcaggttgcccctagggcaggtacaccaggattcagagcaccagaggtcttgacaaagtgccccaatcaaactacagcaattgacatgtggtctgcaggtgtcatatttctttctttgcttagtggacgatatccattttataaagcaagtgatgatttaactgctttggcccaaattatgacaattaggggatccagagaaactatccaagctgctaaaacttttgggaaatcaatattatgtagcaaagaagttccagcacaagacttgagaaaactctgtgagagactcaggggtatggattctagcactcccaagttaacaagtgatatacaggggcatgcttctcatcaaccagctatttcagagaagactgaccataaagcttcttgcctcgttcaaacacctccaggacaatactcagggaattcatttaaaaagggggatagtaatagctgtgagcattgttttgatgagtataataccaatttagaaggctggaatgaggtacctgatgaagcttatgacctgcttgataaacttctagatctaaatccagcttcaagaataacagcagaagaagctttgttgcatccattttttaaagatatgagcttgtga

SEQ ID NO: 253 - protein, 574 aa, Homo sapiens [sequence omitted]

SEQ ID NO: 254 - DNA, 3477 bp, Drosophila melanogaster
atgtttaccttctacaccaatataaataatacactgatcaacaacaacaataataataataatactagtaacagtaataataataataacaacgttataagccagccgattaaaataccgctaaccgagcgcttctcatcgcaaacatcgacgggctcggcggatagcggtgtaattgtttccagtgcatcgcagcagcaactgcagttgccaccaccacgcagtagcagtggatcgctgagtctgccacaagcgccacctggcggcaagtggcggcagaagcagcagcgccaacagttgctgctcagccaggacagcggcatcgaaaatggtgtcaccactcgtccatcgaaagccaaggacaaccagggtgcgggaaaagccagtcacaatgccacaagctcgaaggagagcggcgcgcagtcgaacagcagcagcgagagcctgggcagcaattgctccgaggcccaggagcagcagagagtaagagcctcctccgctctggagctcagcagcgtggacactcccgtgatcgtcggcggtgtggtcagtggaggcaacagcatcttgcgcagccgcattaagtacaagagtacgaacagcaccggaacccagggattcgatgtggaggatcgcatcgatgaggtggatatctgtgatgatgatgatgtcgactgcgatgatcgcggatcggagatcgaggaggaggaggaggaccaaaccgaacaagaggaggaggtcgatgaggtggatgccaagccgaagaaccgacttttgccaccggatcaggcggaactcacagtggcggcggccatggcacgtcgacgcgatgccaagagcctggccaccgacggtcacatatatttcccactgctcaagatcagcgaggatccgcacattgattcgaagctgatcaatcgcaaggatggcctccaggacaccatgtattatttggacgaattcggcagtccaaagttgcgagagaagttcgcccgcaagcagaagcagctgctcgccaagcagcagaagcagttgatgaaacgtgaaaggaggagcgaggagcagcgcaagaagcgaaacaccaccgtggcatccaacttggcggccagcggagcggtggtggacgacaccaaagatgattacaaacaacaaccacactgtgatactagctctaggagcaaaaataactcggtacccaatccacccagcagccatctccatcagaaccacaatcatctcgttgtggatgtgcaagaggatgtggatgatgtgaatgtggttgccaccagcgacgtggacagtggtgtcgtcaagatgcgccgccatagccacgataaccactacgaccgaattccccggagcaatgctgccaccattaccacccgccctcaaatcgaccaacagtcgtcgcaccaccagaacaccgaggatgtggagcaaggagctgagccccaaatcgatggcgaagcggatctggatgcggatgcggatgcggacagcgatgggagtggcgagaacgttaagactgccaaattggccagaacacagtcctgcaaaaaccaaacaggtcgcgatggttctaaaatcacaacagttgttgcaacacccggccaaggcaccgatcgcgtacaagaggtctcctatacagacacaaaggtcatcggcaatggcagcttcggcgtcgtgttccaggcaaagctctgcgataccggcgaactggtggcaatcaaaaaagttttacaagacagacgatttaagaatcgcgaattgcaaataatgcgcaaattggagcattgtaatattgtgaagcttttgtactttttctattcgagtggtgaaaagcgtgatgaagtatttttgaatttagtcctcgaatatataccagaaaccgtatacaaagtggctcgccaatatgccaaaaccaagcaaacgataccaatcaactttattcggctctacatgtatcaactgttcagaagtttggcctacatccactcgctgggcatttgccatcgtgatatcaagccgcagaatcttctgctcgatccggagacggctgtgctgaagctctgtgactttggcagcgccaaacagctgctgcacggcgagccgaatgtatcgtatatctgctcccggtattaccgcgcccccgagctcatctttggcgccatcaattatacaacaaagatcgatgtctggagtgccggttgcgttttggccgaactgctgctgggccagcccatcttccctggcgattccggtgtggatcagctcgtcgaggtcatcaaggtcctgggcacaccgacaagagaacagatacgcgaaatgaatccaaactacacggaattcaagttccctcagattaagagtcatccatggcagaaagttttccgtatacgcactcctacagaagctatcaacttggtgtccctgctgctcgagtatacgcccagtgccaggatcacaccgctcaaggcctgcgcacatccgttcttcgatgagctacgcatggagggtaatcacaccttgcccaacggtcgcgatatgccgccgctgttcaacttcacagagcatgagctctcaatacagcccagcctagtgccgcagttgttgcccaagcatctgcagaacgcatccggacctggcggcaatcgaccctcggccggcggagcagcctccattgcggccagcggctccaccagcgtctcgtcaacgggcagtggtgcctcggtggaaggatccgcccagccacagtcgcagggtacagcagcagctgcgggatccggatcgggcggagcaacagcaggaaccggcggagcgagtgccggtggacccggatctggtaacaacagtagcagcggcggagcatcgggagcgccgtccgctgtggctgccggaggagccaatgccgccgtcgctggcggtgctggtggtggtggcggagccggtgcggcgaccgcagctgcaacagcaactggcgctataggcgcgactaatgccggcggcgccaatgtaacagattcataggggaaatagtaacatacatacacacactaaatatatatccaagcatatatatatagtaatcattatatataacacctacacccacaacaacaacaacagcaattatatataataaccataaacaagaatggagaaagccaatccagcaatcacagcaaactatatacacaacaacaacaattaaattaattaatgcaattgatgaaagaacagcagcagcagcagcagcagcagcagcagcagcatcaaccgcaatttcaaaagaactctagaaacagcaaaggcataaaatataacaaaagaaatattttacttaggtaaaacattaaatttattttaaatctaaaataaactaataagcattaaataatacatgataatggtaaataaacacacaataattataatagtagagcgagcgctgatcgattgtcattttattgctgccgc

SEQ ID NO: 255 - protein, 1008 aa, Drosophila melanogaster
MFTFYTNINNTLINNNNNNNNTSNSNNNNNNVISQPIKIPLTERFSSQTSTGSADSGVIVSSASQQQLQLPPPRSSSGSLSLPQAPPGGKWRQKQQRQQLLLSQDSGIENGVTTRPSKAKDNQGAGKASHNATSSKESGAQSNSSSESLGSNCSEAQEQQRVRASSALELSSVDTPVIVGGVVSGGNSILRSRIKYKSTNSTGTQGFDVEDRIDEVDICDDDDVDCDDRGSEIEEEEEDQTEQEEEVDEVDAKPKNRLLPPDQAELTVAAAMARRRDAKSLATDGHIYFPLLKISEDPHIDSKLINRKDGLQDTMYYLDEFGSPKLREKFARKQKQLLAKQQKQLMKRERRSEEQRKKRNTTVASNLAASGAVVDDTKDDYKQQPHCDTSSRSKNNSVPNPPSSHLHQNHNHLVVDVQEDVDDVNVVATSDVDSGVVKMRRHSHDNHYDRIPRSNAATITTRPQIDQQSSHHQNTEDVEQGAEPQIDGEADLDADADADSDGSGENVKTAKLARTQSCKNQTGRDGSKITTVVATPGQGTDRVQEVSYTDTKVIGNGSFGVVFQAKLCDTGELVAIKKVLQDRRFKNRELQIMRKLEHCNIVKLLYFFYSSGEKRDEVFLNLVLEYIPETVYKVARQYAKTKQTIPINFIRLYMYQLFRSLAYIHSLGICHRDIKPQNLLLDPETAVLKLCDFGSAKQLLHGEPNVSYICSRYYRAPELIFGAINYTTKIDVWSAGCVLAELLLGQPIFPGDSGVDQLVEVIKVLGTPTREQIREMNPNYTEFKFPQIKSHPWQKVFRIRTPTEAINLVSLLLEYTPSARITPLKACAHPFFDELRMEGNHTLPNGRDMPPLFNFTEHELSIQPSLVPQLLPKHLQNASGPGGNRPSAGGAASIAASGSTSVSSTGSGASVEGSAQPQSQGTAAAAGSGSGGATAGTGGASAGGPGSGNNSSSGGASGAPSAVAAGGANAAVAGGAGGGGGAGAATAAATATGAIGATNAGGANVTDS

SEQ ID NO: 256 - DNA, 1389 bp, Homo sapiens
ggagaaggaaggaaaaggtgattcgcgaagagagtgatcatgtcagggcggcccagaaccacctcctttgcggagagctgcaagccggtgcagcagccttcagcttttggcagcatgaaagttagcagagacaaggacggcagcaaggtgacaacagtggtggcaactcctgggcagggtccagacaggccacaagaagtcagctatacagacactaaagtgattggaaatggatcatttggtgtggtatatcaagccaaactttgtgattcaggagaactggtcgccatcaagaaagtattgcaggacaagagatttaagaatcgagagctccagatcatgagaaagctagatcactgtaacatagtccgattgcgttatttcttctactccagtggtgagaagaaagatgaggtctatcttaatctggtgctggactatgttccggaaacagtatacagagttgccagacactatagtcgagccaaacagacgctccctgtgatttatgtcaagttgtatatgtatcagctgttccgaagtttagcctatatccattcctttggaatctgccatcgggatattaaaccgcagaacctcttgttggatcctgatactgctgtattaaaactctgtgactttggaagtgcaaagcagctggtccgaggagaacccaatgtttcgtatatctgttctcggtactatagggcaccagagttgatctttggagccactgattatacctctagtatagatgtatggtctgctggctgtgtgttggctgagctgttactaggacaaccaatatttccaggggatagtggtgtggatcagttggtagaaataatcaaggtcctgggaactccaacaagggagcaaatcagagaaatgaacccaaactacacagaatttaaattccctcaaattaaggcacatccttggactaaggtcttccgaccccgaactccaccggaggcaattgcactgtgtagccgtctgctggagtatacaccaactgcccgactaacaccactggaagcttgtgcacattcattttttgatgaattacgggacccaaatgtcaaacatccaaatgggcgagacacacctgcactcttcaacttcaccactcaagaactgtcaagtaatccacctctggctaccatccttattcctcctcatgctcggattcaagcagctgcttcaacccccacaaatgccacagcagcgtcagatgctaatactggagaccgtggacagaccaataatgctgcttctgcatcagcttccaactccacctgaacagtcccgacgagccagctgcacaggaaaaaccaccagttacttgagtgtcactcagcaacactggtcacgtttggaaagaatatt

SEQ ID NO: 257 - protein, 420 aa, Homo sapiens
MSGRPRTTSFAESCKPVQQPSAFGSMKVSRDKDGSKVTTVVATPGQGPDRPQEVSYTDTKVIGNGSFGVVYQAKLCDSGELVAIKKVLQDKRFKNRELQIMRKLDHCNIVRLRYFFYSSGEKKDEVYLNLVLDYVPETVYRVARHYSRAKQTLPVIYVKLYMYQLFRSLAYIHSFGICHRDIKPQNLLLDPDTAVLKLCDFGSAKQLVRGEPNVSYICSRYYRAPELIFGATDYTSSIDVWSAGCVLAELLLGQPIFPGDSGVDQLVEIIKVLGTPTREQIREMNPNYTEFKFPQIKAHPWTKVFRPRTPPEAIALCSRLLEYTPTARLTPLEACAHSFFDELRDPNVKHPNGRDTPALFNFTTQELSSNPPLATILIPPHARIQAAASTPTNATAASDANTGDRGQTNNAASASASNST

SEQ ID NO: 258 - DNA, 3454 bp, Drosophila melanogaster
cacaaacaacacgctcgtgcgtgcgatttaaatatatagatgtttcaaaagtcaacctctctgttcgcaattgtgtgcattttcgtttgtctagtgcaaaaagttggataatcacaggcggcaaataaaatagtaacgaatcgagttcaagaagaagaagaagagaagaggaagcagaggcagcagcgccggcatttgtccgtgtgttgttgttgttgtttgtgcgcggctgtaactttaaccctcgaacgccataagattaaaaaaccaagtataacaataagttataaaatcaattaaacaaaagccgctgcgatatgacaacgaggaaaaagaagcgcgacggcggcggcagcggcggcggattcatcaagaaagtttcgtcactcttcaatctggattcggtgaatggcgatgatagctggttatacgaggacattcagctggagcgcggcaactccggattgggcttttccattgccggcggtacggataatccgcacatcggcaccgacacctccatctacatcaccaagctcatttccggtggagcagctgccgccgatggacgtctgagcatcaacgatatcatcgtatcggtgaacgatgtgtccgtggtggatgtgccacatgcctccgccgtggatgccctcaagaaggcgggcaatgttgttaagctgcatgtgaagcgaaaacgtggaacggccaccaccccggcagcgggatcggcggcaggagatgctcgggatagtgcggccagcggaccgaaggtcatcgaaatcgatctggtcaagggcggcaagggactgggcttctcaattgccggcggcattggcaaccagcacatccccggcgacaatggcatctatgtgaccaagttgatggacggcggagcagcgcaggtggacggacgtctctccatcggagataagctgattgcagtgcgcaccaacgggagcgagaagaacctggagaacgtaacgcacgaactggcggtggccacgttgaaatcgatcaccgacaaggtgacgctgatcattggaaagacacagcatctgaccaccagtgcgtccggcggcggaggaggaggcctttcatccggacaacaattgtcgcagtcccaatcgcagttggccaccagccagagccaaagtcaggtgcatcagcagcagcatgcgacgccgatggtcaattcgcagtcgacaggtgcgctaaatagtatgggacagacggttgtcgattcaccatcaataccacaagcagccgcagcagtagcagcagcagcaaatgcatctgcatctgcatcagtcattgcaagcaacaacacaatcagcaacaccacagtcaccacagtcacggccacggccacagccagcaacagtagcagcaagttgccgccgtcgcttggcgctaacagcagcattagcattagcaatagcaatagcaatagcaacagcaataatatcaacaacattaatagcatcaacaacaacaacagtagcagcagcagcacgacggcaactgttgcagcagcaacaccaacagcagcatcagcagcagcagcagcagcatcatctccacccgccaactccttctataacaatgcttccatgcccgccctgcctgtcgaatccaatcaaacaaacaaccgatcccaatcaccccagccgcgccagcccgggtcgcgatacgcctctacaaatgtcctagccgccgttccaccaggaactccacgcgctgtcagcaccgaggatataaccagagaaccgcgcaccatcaccatccagaagggaccgcagggcctgggcttcaatatcgttggcggcgaggatggccagggtatctatgtgtccttcatcctggccggcggcccagcggatctcgggtcggagttgaagcgtggcgaccagctgctcagcgtgaacaatgtcaatctcacgcacgccacccacgaagaggcagcccaggcgctcaagacttctggcggtgtggtgaccctgttggcgcagtaccgcccagaggagtacaatcgcttcgaggcacgcattcaagagttgaaacaacaggctgccctcggtgccggcggatcgggaacgctgctgcgcaccacgcaaaagcgatcgctgtatgtgcgcgccctgtttgactacgatccgaatcgggatgatggattgccctcgcgaggattgccctttaagcacggcgatatcctgcacgtgaccaatgcctccgacgatgaatggtggcaggcacgacgagttctcggcgacaacgaggacgagcaaatcggtattgtaccatcgaaaaggcgttgggagcgcaaaatgcgagctagggaccgcagcgttaagttccagggacatgcggcagctaataataatctggataagcaatcgacattggatcgaaagaaaaagaatttcacattctcgcgcaaatttccgtttatgaagagtcgcgatgagaagaatgaagatggcagcgaccaagagcccaatggagttgtgagcagcaccagcgagattgacatcaataatgtcaacaacaaccagtcaaatgaaccgcaaccttccgaggagaacgtgttgtcctacgaggccgtacagcgtttgtccatcaactacacgcgcccggtgattattctgggacccctgaaggatcgcatcaacgatgaccttatatcagagtatcccgacaagttcggctcttgtgtgccacacaccacccgacccaagcgagagtacgaggtggatggtagggactaccactttgtatcctctcgcgagcaaatggaacgggatattcagaatcatctgttcatcgaggcgggacagtataacgacaatctgtacggcacatcggtggccagcgtgcgcgaagtggccgagaagggtaaacactgcatcctggacgtgtccgggaacgccatcaagcgactccaagttgcccagctgtatcccgtcgccgtgttcatcaagcccaagtcggtggattcagtgatggaaatgaatcgtcgcatgacggaggagcaggccaagaagacttacgagcgggcgattaaaatggagcaagaattcggcgaatactttacgggcgttgtccaaggcgataccatcgaggagatttacagcaaagtgaaatcgatgatttggtcccagtcgggaccaaccatttgggtaccttccaaggaatctctatgaccaacagccaccacaacttggacactgccgcctcgagttcgatgtcgaccagtctcgagaacaacaataggagcaacagcagcagcaacaaatcagcagccgcagcagaagacgccgcactgatgatgcatcacagtaacaacagatactaatacaactacaacaacaacaagaacaacaacaacaacagcaaccacagcagcagccacagcgacaacaacaaaaacaacaacactgacaacgacaggaaacgg

SEQ ID NO: 259 - protein, 960 aa, Drosophila melanogaster
MTTRKKKRDGGGSGGGFIKKVSSLFNLDSVNGDDSWLYEDIQLERGNSGLGFSIAGGTDNPHIGTDTSIYITKLISGGAAAADGRLSINDIIVSVNDVSVVDVPHASAVDALKKAGNVVKLHVKRKRGTATTPAAGSAAGDARDSAASGPKVIEIDLVKGGKGLGFSIAGGIGNQHIPGDNGIYVTKLTDGGRAQVDGRLSIGDKLIAVRTNGSEKNLENVTHELAVATLKSITDKVTLIIGKTQHLTTSASGGGGGGLSSGQQLSQSQSQLATSQSQSQVHQQQHATPMVNSQSTGALNSMGQTVVDSPSIPQAAAAVAAAANASASASVIASNNTISNTTVTTVTATATASNDSSKLPPSLGANSSISISNSNSNSNSNNINNINSINNNNSSSSSTTATVAAATPTAASAAAAAASSPPANSFYNNASMPALPVESNQTNNRSQSPQPRQPGSRYASTNVLAAVPPGTPRAVSTEDITREPRTITIQKGPQGLGFNIVGGEDGQGIYVSFILAGGPADLGSELKRGDQLLSVNNVNLTHATHEEAAQALKTSGGVVTLLAQYRPEEYNRFEARIQELKQQAALGAGGSGTLLRTTQKRSLYVRALFDYDPNRDDGLPSRGLPFKHGDILHVTNASDDEWWQARRVLGDNEDEQIGIVPSKRRWERKMRARDRSVKFQGHAAANNNLDKQSTLDRKKKNFTFSRKFPFMKSRDEKNEDGSDQEPNGVVSSTSEIDINNVNNNQSNEPQPSEENVLSYEAVQRLSINYTRPVIILGPLKDRINDDLISEYPDKFGSCVPHTTRPKREYEVDGRDYHFVSSREQMERDIQNHLFIEAGQYNDNLYGTSVASVREVAEKGKHCILDVSGNAIKRLQVAQLYPVAVFIKPKSVDSVMEMNRRMTEEQAKKTYERAIKMEQEFGEYFTGVVQGDTIEEIYSKVKSMIWSQSGPTIWVPSKESL

SEQ ID NO: 260 - DNA, 3263 bp, Drosophila melanogaster
cccccccccccccagttgggtgtgttgttttcgtcgcgttcggttgctcgctttatttttttgtttgtttattttgttttgtgcaatggaaatgtgaacacaaatgtttcaaaagtcaacctctctgttcgcaattgtgtgcattttcgtttgtctagtgcaaaaagttggataacacaggcggcaaataaaatagtaacgaatcgagttcaagaagaagaagaagagaagaggaagcagaggcagcagcgccggcatttgtccgtgtgttgttgttgttgtttgtgcgcggctgtaactttaaccctcgaacgccataagattaaaaaaccaactataacaataagttataaaatcaattaaacaaaagccgctgcgatatgacaacgaggaaaaagaagcgcgacggcggcggcagcggcggcggattcatcaagaaagtttcgtcactcttcaatctggattcggtgaatggcgatgatagctggttatacgaggacattcagctggagcgcggcaactccggattgggcttttccattgccggcggtacggataatccgcacatcggcaccgacacctccatctacatcaccaagctcatttccggtggagcagctgccgccgatggacgtctgagcatcaacgatatcatcgtatcggtgaacgatgtgtccgtggtggatgtgccacatgcctccgccgtggatgccctcaagaaggcgggcaatgttgttaagctgcatgtgaagcgaaaacgtggaacggccaccaccccggcagcgggatcggcggcaggagatgctcgggatagtgcggccagcggaccgaaggtcatcgaaatcgatctggtcaagggcggcaagggactgggcttctcaattgccggcggcattggcaaccagcacatccccggcgacaatggcatctatgtgaccaagttgacggacggcggacgagcgcaggtggacggacgtctctccatcggagataagctgattgcagtgcgcaccaacgggagcgagaagaacctggagaacgtaacgcacgaactggcggtggccacgttgaaatcgatcaccgacaaggtgacgctgatcattggaaagacacagcatctgaccaccagtgcgtccggcggcggaggaggaggcctttcatccggacaacaattgtcgcagtcccaatcgcagttggccaccagccagagccaaagtcaggtgcatcagcagcagcatgcgacgccgatggtcaattcgcagtcgacaggtgcgctaaatagtatgggacagacggttgtcgattcaccatcaataccacaagcagccgcagcagtagcagcagcagcaaatgcatctgcatctgcatcagtcattgcaagcaacaacacaatcagcaacaccacagtcaccacagtcacggccacggccacagccagcaacgatagcagcaagttgccgccgtcgcttggcgctaacagcagcattagcattagcaatagcaatagcaatagcaacagcaataatatcaacaacattaatagcatcaacaacaacaacagtagcagcagcagcacgacggcaactgttgcagcagcaacaccaacagcagcatcagcagcagcagcagcagcatcatctccacccgccaactccttctataacaatgcttccatgcccgccctgcctgtcgaatccaatcaaacaaacaaccgatcccaatcaccccagccgcgccagcccgggtcgcgatacgcctctacaaatgtcctagccgccgttccaccaggaactccacgcgctgtcagcaccgaggatataaccagagaaccacgcaccatcaccatccagaagggaccgcagggcctgggcttcaatatcgttggcggcgaggatggccagggtatctatgtgtccttcatcctggccggcggcccagcggatctcgggtcggagttgaagcgtggcgaccagctgctcagcgtgaacaatgtcaatctcacgcacgccacccacgaagaggcagcccaggcgctcaagacttctggcggtgtggtgaccctgttggcgcagtaccgcccagaggagtacaatcgcttcgaggcacgcattcaagagttgaaacaacaggctgccctcggtgccggcggatcgggaacgctgctgcgcaccacgcaaaagcgatcgctgtatgtgcgcgccctgtttgactacgatccgaatcgggatgatggattgccctcgcgaggattgccctttaagcacggcgatatcctgcacgtgaccaatgcctccgacgatgaatggtggcaggcacgacgagttctcggcgacaacgaggacgagcaaatcggtattgtaccatcgaaaaggcgttgggagcgcaaaatgcgagctagggaccgcagcgttaagttccagggacatgcggcagctaataataatctggataagcaatcgacattggatcgaaagaaaaagaatttcacattctcgcgcaaatttccgtttatgaagagtcgcgatgagaagaatgaagatggcagcgaccaagagcccaatggagttgtgagcagcaccagcgagattgacatcaataatgtcaacaacaaccagtcaaatgaaccgcaaccttccgaggagaacgtgttgtcctacgaggccgtacagcgtttgtccatcaactacacgcgcccggtgattattctgggacccctgaaggatcgcatcaacgatgaccttatatcagagtatcccgacaagttcggctcctgtgtgccacacaccacccgacccaagcgagagtacgaggtggatggtagggactaccactttgtatcctctcgcgagcaaatggaacgggatattcagaatcatctgttcatcgaggcgggacagtataacgacaatctgtacggcacatcggtggccagcgtgcgcgaagtggccgagaagggtaaacactgcatcctggacgtgtccgggaacgccatcaagcgactccaagttgcccagctgtatcccgtcgccgtgttcatcaagcccaagtcggtggattcagtgatggaaatgaatcgtcgcatgacggaggagcaggccaagaagacttacgagcgggcgattaaaatggagcaagaattcggcgaatactttacgggcgttgtccagggcgataccatcgaggagatctacagcaaagtgaaatcgatgatttggtcccagtcgggaccaaccatttgggtaccttccaaggaatctctatga

SEQ ID NO: 261 - protein, 960 aa, Drosophila melanogaster; identical to SEQ ID NO: 259

SEQ ID NO: 262 - DNA, 2486 bp, Homo sapiens
gggaattctggcctgggattcagtattgctggggggacagataatccccacattggagatgaccctggcatatttattacgaagattataccaggaggtgctgcagcagaggatggcagactcagggtcaatgattgtatcttgcgggtgaatgaggttgatgtgtcagaggtttcccacagtaaagcggtggaagccctgaaggaagcagggtctatcgttcggctgtatgtgcgtagaagacgacctattttggagaccgttgtggaaatcaaactgttcaaaggccctaaaggtttaggcttcagtattgcaggaggtgtggggaaccaacacattcctggagacaacagcatttatgtaactaaaattatagatggaggagctgcacaaaaagatggaaggttgcaagtaggagatagactactaatggtaaacaactacagtttagaagaagtaacacacgaagaggcagtagcaatattaaagaacacatcagaggtagtttatttaaaagttggcaaacccactaccatttatatgactgatccttatggtccacctgatattactcactcttattctccaccaatggaaaaccatctactctctggcaacaatggcactttagaatataaaacctccctgccacccatctctccaggaaggtactcaccaattccaaagcacatgcttgttgacgacgactacaccaggcctccggaacctgtttacagcactgtgaacaaactatgtgataagcctgcttctcccaggcactattcccctgttgagtgtgacaaaagcttcctcctctcagctccctattcccactaccacctaggcctgctacctgactctgagatgaccagtcattcccaacatagcaccgcaactcgtcagccttcaatgactctccaacgggccgtctccctggaaggagagcctcgcaaggtagtcctgcacaaaggctccactggcctgggcttcaacattgtcggtggggaagatggagaaggtatttttgtgtccttcattctggctggtggaccagcagacctaagtggggagctccagagaggagaccagatcctatcggtgaatggcattgacctccgtggtgcatcccacgagcaggcagctgctgcactaaagggggctggacagacagtgacgattatagcacaatatcaacctgaagattacgctcgatttgaggccaaaatccatgacctacgagagcagatgatgaaccacagcatgagctccgggtccggatccctgcgaaccaatcagaaacgctccctctacgtcagagccatgttcgactacgacaagagcaaggacagtgggctgccaagtcaaggacttagttttaaatatggagatattctccacgttatcaatgcctctgatgatgagtggtggcaagccaggagagtcatgctggagggagacagtgaggagatgggggtcatccccagcaaaaggagggtggaaagaaaggaacgtgcccgattgaagacagtgaagtttaatgccaaacctggagtgattgattcgaaagggtcattcaatgacaagcgtaaaaagagcttcatcttttcacgaaaattcccattctacaagaacaaggagcagagtgagcaggaaaccagtgatcctgaacgtggacaagaagacctcattctttcctatgagcctgttacaaggcaggaaataaactacacccggccggtgattatcctggggcccatgaaggatcggatcaatgacgacttgatatctgaattccctgataaatttggctcctgtgtgcctcatactacgaggccaaagcgagactacgaggtggatggcagagactatcactttgtcatttccagagaacaaatggagaaagatatccaagagcacaagtttatagaagccggccagtacaatgacaatttatatggaaccagtgtgcagtctgtgagatttgtagcagaaagaggcaaacactgtatacttgatgtatcaggaaatgctatcaagcggttacaagttgcccagctctatcccattgccatcttcataaaacccaggtctctggaacctcttatggagatgaataagcgtctaacagaggaacaagccaagaaaacctatgatcgagcaattaagctagaacaagaatttggagaatattttacagctattgtccaaggagatactttagaagatatatataaccaatgcaagcttgttattgaagagcaatctgggcctttcatctggattccctcaaaggaaaagttataaattagctactgcgcctctgacaacgacagaagagcatttagaagaacaaaatatatataacatactacttggaggcttttatgtttttgttgcatttatgtttttgcagtcaatgtgaattcttacgaatgtacaacacaaactgtatgaagccatgaaggaaacagaggggccaaagggtg

SEQ ID NO: 263 - protein, 624 aa, Homo sapiens
MVNNYSLEEVTHEEAVAILKNTSEVVYLKVGKPTTIYMTDPYGPPDITHSYSPPMENHLLSGNNGTLEYKTSLPPISPGRYSPIPKHMLVDDDYTRPPEPVYSTVNKLCDKPASPRHYSPVECDKSFLLSAPYSHYHLGLLPDSEMTSHSQHSTATRQPSMTLQRAVSLEGEPRKVVLHKGSTGLGFNIVGGEDGEGIFVSFILAGGPADLSGELQRGDQILSVNGIDLRGASHEQAAAALKGAGQTVTIIAQYQPEDYARFEAKIHDLREQMMNHSMSSGSGSLRTNQKRSLYVRAMFDYDKSKDSGLPSQGLSFKYGDILHVINASDDEWWQARRVMLEGDSEEMGVIPSKRRVERKERARLKTVKFNAKPGVIDSKGSFNDKRKKSFIFSRKFPFYKNKEQSEQETSDPERGQEDLILSYEPVTRQEINYTRPVIILGPMKDRINDDLISEFPDKFGSCVPHTTRPKRDYEVDGRDYHFVISREQMEKDIQEHKFIEAGQYNDNLYGTSVQSVRFVAERGKHCILDVSGNAIKRLQVAQLYPIAIFIKPRSLEPLMEMNKRLTEEQAKKTYDRAIKLEQEFGEYFTAIVQGDTLEDIYNQCKLVIEEQSGPFIWIPSKEKL

SEQ ID NO: 264 - DNA, 3071 bp, Homo sapiens
aaaagcaactgaggtcttaactttcagacgctgaattctcatctaattgaaattactgggcataatgctatatatagccaatgaagagattttgagctctcactcagtgccttcaagacatgtcgttttgtagtcagagaaaacagagatcaatgcattttcaaactgacagagggaacggatgctctttagtagcacatgcccaggatcgtgtgtgtggggcttgcgctgtgctgagaagctgaataccggtccatatgctccttatttactgcaatgttctttgcatgttactgtgcactccggactaacgtgaagaagtatcgatatcaagatgaggacgctccacatgatcattccttacctcgactaacccacgaagtaagaggcccagaactcgtgcatgtatcagaaaagaacctctctcaaatagaaaatgtccatggatatgtcctgcagtctcatatttctcctctgaaggccagtcctgctcctataattgtcaacacagatactttggacacaattccttatgtcaatgggacagaaattgaatatgaatttgaagaaattacactggagagggggaattctggcctgggattcagtattgctggggggacagataatccccacattggagatgaccctggcatatttattacgaagattataccaggaggtgctgcagcagaggatggcagactcagggtcaatgattgtatcttgcgggtgaatgaggttgatgtgtcagaggtttcccacagtaaagcggtggaagccctgaaggaagcagggtctatcgctcggctgtatgtgcgtagaagacgacctattttggagaccgttgtggaaatcaaactgttcaaaggccctaaaggtttaggcttcagtattgcaggaggtgtggggaaccaacacattcctggagacaacagcatttatgtaactaaaattatagatggaggagctgcacaaaaagatggaaggttgcaagtaggagatagactactaatggtaaacaactacagtttagaagaagtaacacacgaagaggcagtagcaatattaaagaacacatcagaggtagtttatttaaaagttggcaaccccactaccatttatatgactgatccttatggtccacctgatattactcactcttattctccaccaatggaaaaccatctactctctggcaacaatggcactttagaatataaaacctccctgccacccatctctccagggaggtactcaccaattccaaagcacatgcttgttgacgacgactacaccaggcctccggaacctgtttacagcactgtgaacaaactatgtgataagcctgcttctcccaggcactattcccctgttgagtgtgacaaaagcttcctcctctcagctccctattcccactaccacctaggcctgctacctgactctgagatgaccagtcattcccaacatagcaccgcaactcgtcagccttcaatgactctccaacgggccgtctccctggaaggagagcctcgcaaggtagtcctgcacaaaggctccactggcctgggcttcaacattgtcggtggggaagatggagaaggtatttttgtgtccttcattctggctggtggaccagcagacctaagtggggagctccagagaggagaccagatcctatcggtgaatggcattgacctccgtggtgcatcccacgagcaggcagctgctgcactaaagggggctggacagacagtgacgattatagcacaatatcaacctgaagattacgctcgatttgaggccaaaatccatgacctacgagagcagatgatgaaccacagcatgagctccgggtccggatccctgcgaaccaatcagaaacgctccctctacgtcagagccatgttcgactacgacaagagcaaggacagtgggctgccaagtcaaggacttagttttaaatatggagatattctccacgttatcaatgcctctgatgatgagtggtggcaagccaggagagtcatgctggagggagacagtgaggagatgggggtcatccccagcaaaaggagggtggaaagaaaggaacgtgcccgattgaagacagtgaagtttaatgccaaacctggagtgattgattcgaaagggtcattcaatgacaagcgtaaaaagagcttcatcttttcacgaaaattcccattctacaagaacaaggagcagagtgagcaggaaaccagtgatcctgaacgtggacaagaagacctcattctttcctatgagcctgttacaaggcaggaaataaactacacccggccggtgattatcctggggcccatgaaggatcggatcaatgacgacttgatatctgaattccctgataaatttggctcctgtgtgcctcatactacgaggccaaagcgagactacgaggtggatggcagagactatcactttgtcatttccagagaacaaatggagaaagatatccaagagcacaagtttatagaagccggccagtacaatgacaatttatatggaaccagtgtgcagtctgtgagatttgtagcagaaagaggcaaacactgtatacttgatgtatcaggaaatgctatcaagcggttacaagttgcccagctctatcccattgccatcttcataaaacccaggtctctggaatctcttatggagatgaataagcgtctaacagaggaacaagccaagaaaacctatgatcgagcaattaagctagaacaagaatttggagaatattttacagctattgtccaaggagatactttagaagatatatataaccaatgcaagcttgttattgaagagcaatctgggcctttcatctggattccctcaaaggaaaagttataaattagctactgcgcctctgacaacgacagaagagcatttagaagaacaaaatatatataacatactacttggaggcttttatgtttttgttgcatttatgtttttgcagtcaatgtgaattcttacgaatgtacaacacaaactgtatgaagccatgaaggaaacagaggggccaaagggtg

SEQ ID NO: 265 - protein, 854 aa, Homo sapiens
FFACYCALRTNVKKYRYQDEDAPHDHSLPRLTHEVRGPELVHVEKNLSQIENVHGYVLQSHISPLKASPAPIIVNTDTLDTIPYVNGTEIEYEFEEITLEGNSGLGFSIAGGTDNPHIGDDPGIFITKIIPGGAAAEDGRLRVNDCILRVNEVDVSESHSKAVEALKEAGSIARLYVRRRRPILETVVEIKLFKGPKGLGFSIAGGVGNQHIPGNSIYVTKIIDGGAAQKDGRLQVGDRLLMVNNYSLEEVTHEEAVAILKNTSEVVYLKVNPTTIYMTDPYGPPDITHSYSPPMENHLLSGNNGTLEYKTSLPPISPGRYSPIPKHMVDDDYTRPPEPVYSTVNKLCDKPASPRHYSPVECDKSFLLSAPYSHYHLGLLPDSEMSHSQHSTATRQPSMTLQRAVSLEGEPRKVVLHKGSTGLGFNIVGGEDGEGIFVSFILGGPADLSGELQRGDQILSVNGIDLRGASHEQAAAALKGAGQTVTIIAQYQPEDYARFAKIHDLREQMMNHSMSSGSGSLRTNQKRSLYVRAMFDYDKSKDSGLPSQGLSFKYGDLHVINASDDEWWQARRVMLEGDSEEMGVIPSKRRVERKERARLKTVKFNAKPGVIDSGSFNDKRKKSFIFSRKFPFYKNKEQSEQETSDPERGQEDLILSYEPVTRQEINYTRPIILGPMKDRINDDLISEFPDKFGSCVPHTTRPKRDYEVDGRDYHFVISREQMEKDIQHKFIEAGQYNDNLYGTSVQSVRFVAERGKHCILDVSGNAIKRLQVAQLYPIAIFIKPSLESLMEMNKRLTEEQAKKTYDRAIKLEQEFGEYFTAIVQGDTLEDIYNQCKLVIEESGPFIWIPSKEKL

SEQ ID NO: 266 - DNA, 3046 bp, Homo sapiens
gttggaaacggcactgctgagtgaggttgaggggtgtctcggtatgtgcgccttggatctggtgtaggcgaggtcacgcctctcttcagacagcccgagccttcccggcctggcgcgtttagttcggaactgcgggacgccggtgggctagggcaaggtgtgtgccctcttcctgattctggagaaaaatgccggtccggaagcaagatacccagagagcattgcaccttttggaggaatatcgttcaaaactaagccaaactgaagacagacagctcagaagttccatagaacgggttattaacatatttcagagcaacctctttcaggctttaatagatattcaagaattttatgaagtgaccttactggataatccaaaatgtatagatcgttcaaagccgtctgaaccaattcaacctgtgaatacttgggagatttccagccttccaagctctactgtgacttcagagacactgccaagcagccttagccctagtgtagagaaatacaggtatcaggatgaagatacacctcctcaagagcatatttccccacaaatcacaaatgaagtgataggtccagaattggttcatgtctcagagaagaacttatcagagattgagaatgtccatggatttgtttctcattctcatatttcaccaataaagccaacagaagctgttcttccctctcctcccactgtccctgtgatccctgtcctgccagtccctgctgagaatactgtcatcctacccaccataccacaggcaaatcctcccccagtactggtcaacacagatagcttggaaacaccaacttacgttaatggcacagatgcagattatgaatatgaagaaatcacacttgaaaggggaaattcagggcttggtttcagcattgcaggaggtacggacaacccacacattggagatgactcaagtattttcattaccaaaattatcacagggggagcagccgcccaagatggaagattgcgggtcaatgactgtatattacaagtaaatgaagtagatgttcgtgatgtaacacatagcaaagcagttgaagcgttgaaagaagcagggtctattgtacgcttgtatgtaaaaagaaggaaaccagtgtcagaaaaaataatggaaataaagctcattaaaggtcctaaaggtcttgggtttagcattgctggaggtgttggaaatcagcatattcctggggataatagcatctatgtaaccaaaataattgaaggaggtgcagcacataaggatggcaaacttcagattggagataaacttttagcagtgaataacgtatgtttagaagaagttactcatgaagaagcagtaactgccttaaagaacacatctgattttgtttatttgaaagtggcaaaacccacaagtatgtatatgaatgatggctatgcaccacctgatatcaccaactcttcttctcagcctgttgataaccatgttagcccatcttccttcttgggccagacaccagcatctccagccagatactccccagtttctaaagcagtacttggagatgatgaaattacaagggaacctagaaaagttgttcttcatcgtggctcaacgggccttggtttcaacattgtaggaggagaagatggagaaggaatatttatttcctttatcttagccggaggacctgctgatctaagtggagagctcagaaaaggagatcgtattatatcggtaaacagtgttgacctcagagctgctagtcatgagcaggcagcagctgcattgaaaaatgctggccaggctgtcacaattgttgcacaatatcgacctgaagaatacagtcgttttgaagctaaaatacatgatttacgggagcagatgatgaatagtagtattagttcagggtcaggttctcttcgaactagccagaagcgatccctctatgtcagagccctttttgattatgacaagactaaagacagtgggcttcccagtcagggactgaacttcaaatttggagatatcctccatgttattaatgcttctgatgatgaatggtggcaagccaggcaggttacaccagatggtgagagcgatgaggtcggagtgattcccagtaaacgcagagttgagaagaaagaacgagcccgattaaaaacagtgaaattcaattctaaaacgagagataaagggcagtcattcaatgacaagcgtaaaaagaacctcttttcccgaaaattccccttctacaagaacaaggaccagagtgagcaggaaacaagtgatgctgaccagcatgtaacttctaatgccagcgatagtgaaagtagttaccgtggtcaagaagaatacgtcttatcttatgaaccagtgaatcaacaagaagttaattatactcgaccagtgatcatattgggacctatgaaagacaggataaatgatgacttgatctcagaatttcctgacaaatttggatcctgtgttcctcatacaactagaccaaaacgagattatgaggtagatggaagagattatcattttgtgacttcaagagagcagatggaaaaagatatccaggaacataaattcattgaagctggccagtataacaatcatctatatggaacaagtgttcagtctgtacgagaagtagcaggaaagggcaaacactgtatccttgatgtgtctggaaatgccataaagagattacagattgcacagctttaccctatctccatttttattaaacccaaatccatggaaaatatcatggaaatgaataagcgtctaacagaagaacaagccagaaaaacatttgagagagccatgaaactggaacaggagtttactgaacatttcacagctattgtacagggggatacgctggaagacatttacaaccaagtgaaacagatcatagaagaacaatctggttcttacatctgggttccggcaaaagaaaagctatgaaaactcatgtttctctgtttctcttttccacaattccattttctttggcatctctttgccctttcctctggaaaaaa

SEQ ID NO: 267 - protein, 926 aa, Homo sapiens
MPVRKQDTQRALHLLEEYRSKLSQTEDRQLRSSIERVINIFQSNLFQALIDIQEFYEVTLLDNPKCIDRSKPSEPIQPVNTWEISSLPSSTVTSETLPSSLSPSVEKYRYQDEDTPPQEHISPQITNEVIGPELVHVSEKNLSEIENVHGFVSHSHISPIKPTEAVLPSPPTVPVIPVLPVPAENTVILPTIPQANPPPVLVNTDSLETPTYVNGTDADYEYEEITLERGNSGLGFSIAGGTDNPHIGDDSSIFITKIITGGAAAQDGRLRVNDCILQVNEVDVRDVTHSKAVEALKEAGSIVRLYVKRRKPVSEKIMEIKLIKGPKGLGFSIAGGVGNQHIPGDNSIYVTKIIEGGAAHKDGKLQIGDKLLAVNNVCLEEVTHEEAVTALKNTSDFVYLKVAKPTSMYMNDGYAPPDITNSSSQPVDNHVSPSSFLGQTPASPARYSPVSKAVLGDDEITREPRKVVLHRGSTGLGFNIVGGEDGEGIFISFILAGGPADLSGELRKGDRIISVNSVDLRAASHEQAAAALKNAGQAVTIVAQYRPEEYSRFEAKIHDLREQMMNSSISSGSGSLRTSQKRSLYVRALFDYDKTKDSGLPSQGLNFKFGDILHVINASDDEWWQARQVTPDGESDEVGVIPSKRRVEKKERARLKTVKFNSKTRDKGQSFNDKRKKNLFSRKFPFYKNKDQSEQETSDADQHVTSNASDSESSYRGQEEYVLSYEPVNQQEVNYTRPVIILGPMKDRINDDLISEFPDKFGSCVPHTTRPKRDYEVDGRDYHFVTSREQMEKDIQEHKFIEAGQYNNHLYGTSVQSVREVAGKGKHCILDVSGNAIKRLQIAQLYPISIFIKPKSMENIMEMNKRLTEEQARKTFERAMKLEQEFTEHFTAIVQGDTLEDIYNQVKQIIEEQSGSYIWVPAKEKL

SEQ ID NO: 268 - DNA, 515 bp, Drosophila melanogaster
ggaggcctttcatccggacaacaattgtcgcagtcccaatcgcagttggccaccagccagagccaaagtcaggtgcatcagcagcagcatgcgacgccgatggtcaattcgcagtcgacaggtgcgctaaatagtatgggacagacggttgtcgattcaccatcaataccacaagcagccgcagcagtagcagcagcagcaaatgcatctgcatctgcatcagtcattgcaagcaacaacacaatcagcaacaccacagtcaccacagtcacggccacggccacagccagcaacagtagcagcaagttgccgccgtcgcttggcgctaacagcagcattagcattagcaatagcaatagcaatagcaacagcaataatatcaacaacattaatagcatcaacaacaacaacagtagcagcagcagcacgacggcaactgttgcagcagcaacaccaacagcagcatcagcagcagcagcagcagcatcatctccacccgccaactccttctataa

SEQ ID NO: 269 - DNA, 48 bp, Artificial sequence
  Primer
taatacgactcactatagggagaggaggcctttcatccggacaacaat

SEQ ID NO: 270 - DNA, 48 bp, Artificial sequence
  Primer
taatacgactcactatagggagattatagaaggagttggcgggtggag

SEQ ID NO: 271 - RNA, 21 nt, Artificial sequence
  short interfering RNA
aacauugucgguggggaagau

SEQ ID NO: 272 - RNA, 21 nt, Artificial sequence
  short interfering RNA
aaaacccaggucucuggaacc

SEQ ID NO: 273 - RNA, 21 nt, Artificial sequence
  short interfering RNA
aaaggggaaauucagggcuug

SEQ ID NO: 274 - RNA, 21 nt, Artificial sequence
  short interfering RNA
aaguagcaggaaagggcaaac

SEQ ID NO: 275 - DNA, 792 bp, Drosophila melanogaster
atgtttgccatatcattgcagctgctcagctcgctggccagcgatttggacataatgctaaacgatcttcgatcggcgccgagtcatgctgcaacagcaacagcaacagcaacaacaacggcaacagttgcaactgcaaccgcaacaacaacggccaaccggcagcagcaacatcataatcaccataatcagcagcaaatgcaatcaaggcaattgcatgcacatcattggcagagcattaacaacaataagaataacaacattagtaacaaaaacaacaacaacaacaacaataataacaataacattaataacaataataataataataatcattcggcacacccaccttgcctgatcgatattaagctgaagtcaagccgatcggcagcaacaaaaataacccatacaacaaccgccaatcagctgcagcaacaacaacgccgccgtgtggcacccaagccactgccacgcccaccgcgacgtacccgcccaacgggacaaaaggaggtggggccgtctgaagaggatggggacacggatgccagtgacctggccaatatgacatcaccgctgagcgccagtgcagcggccactcgaatcaacggcctctcgccggaagtgaagaaagtccagcggttgccactgtggaatgcgcgaaacggaaacggaagtaccaccacccactgtcacccaaccggcgtctctgtgcaacgccgtctgcccatccaaagtcatcagcagcgaattctaaaccaacgatttcatcaccagcgaatgcatcatgggtaa

SEQ ID NO: 276 - protein, 262 aa, Drosophila melanogaster
MFAISLQLLSSLASDLDIMLNDLRSAPSHAATATATATTTATVATATATTTANRQQQHHNHHNQQQMQSRQLHAHHWQSINNKNNNISNKNNNNNNNNNNNINNNNNNNNHSAHPPCLIDIKLKSSRSAATKITHTTTANQLQQQQRRRVAPKPLPRPPRRTRPTGQKEVGPSEEDGDTDASDLANMTSPLSASAAATRINGLSPEVKKVQRLPLWNARNGNGSTTTHCHPTGVSVQRRLPIQSHQQRILNQRFHHQRMHHG

SEQ ID NO: 277 - DNA, 1821 bp, Homo sapiens
ggccggcagcggctgagcgacatgagcatttctacttcctcctccgactcgctggagttcgaccggagcatgcctctgtttggctacgaggcggacaccaacagcagcctggaggactacgagggggaaagtgaccaagagaccatggcgccccccatcaagtccaaaaagaaaaggagcagctccttcgtgctgcccaagctcgtcaagtcccagctgcagaaggtgagcggggtgttcagctccttcatgaccccggagaagcggatggtccgcaggatcgccgagctttcccgggacaaatgcacctacttcgggtgcttagtgcaggactacgtgagcttcctgcaggagaacaaggagtgccacgtgtccagcaccgacatgctgcagaccatccggcagttcatgacccaggtcaagaactatttgtctcagagctcggagctggacccccccatcgagtcgctgatccctgaagaccaaatagatgtggtgctggaaaaagccatgcacaagtgcatcttgaagcccctcaaggggcacgtggaggccatgctgaaggactttcacatggccgatggctcatggaagcaactcaaggagaacctgcagcttgtgcggcagaggaatccgcaggagctgggggtcttcgccccgacccctgattttgtggatgtggagaaaatcaaagtcaagttcatgaccatgcagaagatgtattcgccggaaaagaaggtcatgctgctgctgcgggtctgcaagctcatttacacggtcatggagaacaactcagggaggatgtatggcgctgatgacttcttgccagtcctgacctatgtcatagcccagtgtgacatgcttgaattggacactgaaatcgagtacatgatggagctcctagacccatcgctgttacatggagaaggaggctattacttgacaagcgcatatggagcactttctctgataaagaatttccaagaagaacaagcagcgcgactgctcagctcagaaaccagagacaccctgaggcagtggcacaaacggagaaccaccaaccggaccatcccctctgtggacgacttccagaattacctccgagttgcatttcaggaggtcaacagtggttgcacaggaaagaccctccttgtgagaccttacatcaccactgaggatgtgtgtcagatctgcgctgagaagttcaaggtgggggaccctgaggagtacagcctctttctcttcgttgacgagacatggcagcagctggcagaggacacttaccctcaaaaaatcaaggcggagctgcacagccgaccacagccccacatcttccactttgtctacaaacgcatcaagaacgatccttatggcatcattttccagaacggggaagaagacctcaccacctcctagaagacaggcgggacttcccagtggtgcatccaaaggggagctggaagccttgccttcccgcttctacatgcttgagcttgaaaagcagtcacctcctcggggacccctcagtgtagtgactaagccatccacaggccaactcggccaagggcaactttagccacgcaaggtagctgaggtttgtgaaacagtaggattctcttttggcaatggagaattgcatctgatggttcaagtgtcctgagattgtttgctacctacccccagtcaggttctaggttggcttacaggtatgtatatgtgcagaagaaacacttaagatacaagttcttttgaattcaacagcagatgcttgcgatgcagtgcgtcaggtgattctcactcctgtggatggcttcatccctg

SEQ ID NO: 278 - protein, 471 aa, Homo sapiens
GRQRLSDMSISTSSSDSLEFDRSMPLFGYEADTNSSLEDYEGESDQETMAPPIKSKKKRSSSFVLPKLVKSQLQKVSGVFSSFMTPEKRMVRRIAELSRDKCTYFGCLVQDYVSFLQENKECHVSSTDMLQTIRQFMTQVKNYLSQSSELDPPIESLIPEDQIDVVLEKAMHKCILKPLKGHVEAMLKDFHMADGSWKQLKENLQLVRQRNPQELGVFAPTPDFVDVEKIKVKFMTMQKMYSPEKKVMLLLRVCKLIYTVMENNSGRMYGADDFLPVLTYVIAQCDMLELDTEIEYMMELLDPSLLHGEGGYYLTSAYGALSLIKNFQEEQAARLLSSETRDTLRQWHKRRTTNRTIPSVDDFQNYLRVAFQEVNSGCTGKTLLVRPYITTEDVCQICAEKFKVGDPEEYSLFLFVDETWQQLAEDTYPQKIKAELHSRPQPHIFHFVYKRIKNDPYGIIFQNGEEDLTTS

SEQ ID NO: 279 - protein, 686 aa, Drosophila melanogaster
MSSRRWFHPTISGIEAEKLLQEQGFDGSFLARLSSSNPGAFTLSVRRGNEVTHIKIQNNGDFFDLYGGEKFATLPELVQYYMENGELKEKNGQAIELKQPLICAEPTTERWFHGNLSGKEAEKLILERGKNGSFLVRESQSKPGDFVLSVRTDDKVTHVMIRWQDKKYDVGGGESFGTLSELIDHYKRNPMVETCGTVVHLRQPFNATRITAAGINARVEQLVKGGFWEEFESLQQDSRDTFSRNEGYKQENRLKNRYRNILPYDHTRVKLLDVEHSVAGAEYINANYIRLPTDGDLYNMSSSSESLNSSVPSCPACTAAQTQRNCSNCQLQNKTCVQCAVKSAILPYSNCATCSRKSDSLSKHKRSESSASSSPSSGSGSGPGSSGTSGVSSVNGPGTPTNLTSGTAGCLVGLLKRHSNDSSGAVSISMAEREREREREMFKTYIATQGCLLTQQVNTVTDFWNMVWQENTRVIVMTTKEYERGKEKCARYWPDEGRSEQFGHARIQCVSENSTSDYTLREFLVSWRDQPARRIFHYHFQVWPDHGVPADPGCVLNFLQDVNTRQSHLAQAGEKPGPICVHCSAGIGRTGTFIVIDMILDQIVRNGLDTEIDIQRTIQMVRSQRSGLVQTEAQYKFVYYAVQHYIQTLIARKRAEEQSLQVGREYTNIKYTGEIGNDSQRSPLPP

SEQ ID NO: 280 - protein, 562 aa, Homo sapiens
MTSRRWFHPNITGVEAENLLLTRGVDGSFLARPSKSNPGDFTLSVRRNGAVTHIKIQNTGDYYDLYGGEKFATLAELVQYYMEHHGQLKEKNGDVIELKYPLNCADPTSERWFHGHLSGKEAEKLLTEKGKHGSFLVRESQSHPGDFVLSVRTGDDKGESNDGKSKVTHVMIRCQELKYDVGGGERFDSLTDLVEHYKKNPMVETLGTVLQLKQPLNTTRINAAEIESRVRELSKLAETTDKVKQGFWEEFETLQQQECKLLYSRKEGQRQENKNKNRYKNILPFDHTRVVLHDGDPNEPVSDYINANIIMPEFETKCNNSKPKKSYIATQGCLQNTVNDFWRMVFQENSRVIVMTTKEVERGKSKCVKYWPDEYALKEYGVMRVRNVKESAAHDYTLRELKLSKVGQGNTERTVWQYHFRTWPDHGVPSDPGGVLDFLEEVHHKQESIMDAGPVVVHCSAGIGRTGTFIVIDILIDIIREKGVDCDIDVPKTIQMVRSQRSGMVQTEAQYRFIYMAVQHYIETLQRRIEEEQKSKRKGHEYTNIKYSLADQTSGDQSPLPP

SEQ ID NO: 281 - protein, 508 aa, Drosophila melanogaster
  MISC_FEATURE 132..146, 287..303: Xaa is uncertain
QPGSRYASTNVLAAVPPGTPRAVSTEDITREPRTITIQKGPQGLGFNIVGGEDGQGIYVSFILAGGPADLGSELKRGDQLLSVNNVNLTHATHEEAAQALKTSGGVVTLLAQYRPEEYNRFEARIQELKQQXXXXXXXXXXXXXXXQKRSLYVRALFDYDPNRDDGLPSRGLPFKHGDILHVTNASDDEWWQARRVLGDNEDEQIGIVPSKRRWERKMRARDRSVKFQGHAAANNNLDKQSTLDRKKKNFTFSRKFPFMKSRDEKNEDGSDQEPNGVVSSTSEIDIXXXXXXXXXXXXXXXXXVLSYEAVQRLSINYTRPVIILGPLKDRINDDLISEYPDKFGSCVPHTTRPKREYEVDGRDYHFVSSREQMERDIQNHLFIEAGQYNDNLYGTSVASVREVAEKGKHCILDVSGNAIKRLQVAQLYPVAVFIKPKSVDSVMEMNRRMTEEQAKKTYERAIKMEQEFGEYFTGVVQGDTIEEIYSKVKSMIWSQSGPTIWVPSKESL

SEQ ID NO: 282 - protein, 502 aa, Homo sapiens
QPVDNHVSPSSFLGQTPASPARYSPVSKAVLGDDEITREPRKVVLHRGSTGLGFNIVGGEDGEGIFISFILAGGPADLSGELRKGDRIISVNSVDLRAASHEQAAAALKNAGQAVTIVAQYRPEEYSRFEAKIHDLREQMMNSSISSGSGSLRTSQKRSLYVRALFDYDKTKDSGLPSQGLNFKFGDILHVINASDDEWWQARQVTPDGESDEVGVIPSKRRVEKKERARLKTVKFNSKTRDKGQSFNDKRKKNLFSRKFPFYKNKDQSEQETSDADQHVTSNASDSESSYRGQEEYVLSYEPVNQQEVNYTRPVIILGPMKDRINDDLISEFPDKFGSCVPHTTRPKRDYEVDGRDYHFVTSREQMEKDIQEHKFIEAGQYNNHLYGTSVQSVREVAGKGKHCILDVSGNAIKRLQIAQLYPISIFIKPKSMENIMEMNKRLTEEQARKTFERAMKLEQEFTEHFTAIVQGDTLEDIYNQVKQIIEEQSGSYIWVPAKEKL

SEQ ID NO: 283 - protein, 220 aa, Drosophila melanogaster
  MISC_FEATURE 64..80, 104..127: Xaa is uncertain
LFNLDSVNGDDSWLYEDIQLERGNSGLGFSIAGGTDNPHIGTDTSIYITKLISGGAAAADGRLXXXXXXXXXXXXXXXXXPHASAVDALKKAGNVVKLHVKRKXXXXXXXXXXXXXXXXXXXXXXXXKVIEIDLVKGGKGLGFSIAGGIGNQHIPGDNGIYVTKLTDGGRAQVDGRLSIGDKLIAVRTNGSEKNLENVTHELAVATLKSITDKVTLIIGK

SEQ ID NO: 284 - protein, 204 aa, Homo sapiens
LVNTDSLETPTYVNGTDADYEYEEITLERGNSGLGFSIAGGTDNPHIGDDSSIFITKIITGGAAAQDGRLRVNDCILQVNEVDVRDVTHSKAVEALKEAGSIVRLYVKRRKPVSEKIMEIKLIKGPKGLGFSIAGGVGNQHIPGDNSIYVTKIIEGGAAHKDGKLQIGDKLLAVNNVCLEEVTHEEAVTALKNTSDFVYLKVAK

SEQ ID NO: 285 - protein, 201 aa, Drosophila melanogaster
  MISC_FEATURE 48..64, 88..111: Xaa is uncertain
DIQLERGNSGLGFSIAGGTDNPHIGTDTSIYITKLISGGAAAADGRLXXXXXXXXXXXXXXXXXPHASAVDALKKAGNVVKLHVKRKXXXXXXXXXXXXXXXXXXXXXXXXKVIEIDLVKGGKGLGFSIAGGIGNQHIPGDNGIYVTKLTDGGRAQVDGRLSIGDKLIAVRTNGSEKNLENVTHELAVATLKSITDKVTLI

SEQ ID NO: 286 - protein, 224 aa, Homo sapiens
EIKLIKGPKGLGFSIAGGVGNQHIPGDNSIYVTKIIEGGAAHKDGKLQIGDKLLAVNNVCLEEVTHEEAVTALKNTSDFVYLKVAKPTSMYMNDGYAPPDITNSSSQPVDNHVSPSSFLGQTPASPARYSPVSKAVLGDDEITREPRKVVLHRGSTGLGFNIVGGEDGEGIFISFILAGGPADLSGELRKGDRIISVNSVDLRAASHEQAAAALKNAGQAVTIV

SEQ ID NO: 287 - protein, 135 aa, Drosophila melanogaster
MPALPVESNQTNNRSQSPQPRQPGSRYASTNVLAAVPPGTPRAVSTEDITREPRTITIQKGPQGLGFNIVGGEDGQGIYVSFILAGGPADLGSELKRGDQLLSVNNVNLTHATHEEAAQALKTSGGVVTLLAQYR

SEQ ID NO: 288 - protein, 135 aa, Homo sapiens
IPVLPVPAENTVILPTIPQANPPPVLVNTDSLETPTYVNGTDADYEYEEITLERGNSGLGFSIAGGTDNPHIGDDSSIFITKIITGGAAAQDGRLRVNDCILQVNEVDVRDVTHSKAVEALKEAGSIVRLYVKRR

SEQ ID NO: 289 - protein, 75 aa, Drosophila melanogaster
ITIQKGPQGLGFNIVGGEDGQGIYVSFILAGGPADLGSELKRGDQLLSVNNVNLTHATHEEAAQALKTSGGVVTL

SEQ ID NO: 290 - protein, 81 aa, Homo sapiens
IKLIKGPKGLGFSIAGGVGNQHIPGDNSIYVTKIIEGGAAHKDGKLQIGDKLLAVNNVCLEEVTHEEAVTALKNTSDFVYL

SEQ ID NO: 291 - protein, 523 aa, Drosophila melanogaster
  MISC_FEATURE 147..161, 302..318: Xaa is uncertain
ESNQTNNRSQSPQPRQPGSRYASTNVLAAVPPGTPRAVSTEDITREPRTITIQKGPQGLGFNIVGGEDGQGIYVSFILAGGPADLGSELKRGDQLLSVNNVNLTHATHEEAAQALKTSGGVVTLLAQYRPEEYNRFEARIQELKQQXXXXXXXXXXXXXXXQKRSLYVRALFDYDPNRDDGLPSRGLPFKHGDILHVTNASDDEWWQARRVLGDNEDEQIGIVPSKRRWERKMRARDRSVKFQGHAAANNNLDKQSTLDRKKKNFTFSRKFPFMKSRDEKNEDGSDQEPNGVVSSTSEIDIXXXXXXXXXXXXXXXXXVLSYEAVQRLSINYTRPVIILGPLKDRINDDLISEYPDKFGSCVPHTTRPKREYEVDGRDYHFVSSREQMERDIQNHLFIEAGQYNDNLYGTSVASVREVAEKGKHCILDVSGNAIKRLQVAQLYPVAVFIKPKSVDSVMEMNRRMTEEQAKKTYERAIKMEQEFGEYFTGVVQGDTIEEIYSKVKSMIWSQSGPTIWVPSKESL

SEQ ID NO: 292 - protein, 482 aa, Homo sapiens
DSEMTSHSQHSTATRQPSMTLQRAVSLEGEPRKVVLHKGSTGLGFNIVGGEDGEGIFVSFILAGGPADLSGELQRGDQILSVNGIDLRGASHEQAAAALKGAGQTVTIIAQYQPEDYARFEAKIHDLREQMMNHSMSSGSGSLRTNQKRSLYVRAMFDYDKSKDSGLPSQGLSFKYGDILHVINASDDEWWQARRVMLEGDSEEMGVIPSKRRVERKERARLKTVKFNAKPGVIDSKGSFNDKRKKSFIFSRKFPFYKNKEQSEQETSDPERGQEDLILSYEPVTRQEINYTRPVIILGPMKDRINDDLISEFPDKFGSCVPHTTRPKRDYEVDGRDYHFVISREQMEKDIQEHKFIEAGQYNDNLYGTSVQSVRFVAERGKHCILDVSGNAIKRLQVAQLYPIAIFIKPRSLESLMEMNKRLTEEQAKKTYDRAIKLEQEFGEYFTAIVQGDTLEDIYNQCKLVIEEQSGPFIWIPSKEKL

SEQ ID NO: 293 - protein, 220 aa, Drosophila melanogaster
  MISC_FEATURE 65..81, 105..128: Xaa is uncertain
SLFNLDSVNGDDSWLYEDIQLERGNSGLGFSIAGGTDNPHIGTDTSIYITKLISGGAAAADGRLXXXXXXXXXXXXXXXXXPHASAVDALKKAGNVVKLHVKRKXXXXXXXXXXXXXXXXXXXXXXXXKVIEIDLVKGGKGLGFSIAGGIGNQHIPGDNGIYVTKLTDGGRAQVDGRLSIGDKLIAVRTNGSEKNLENVTHELAVATLKSITDKVTLIIG

SEQ ID NO: 294 - protein, 198 aa, Homo sapiens
TLDTIPYVNGTEIEYEFEEITLERGNSGLGFSIAGGTDNPHIGDDPGIFITKIIPGGAAAEDGRLRVNDCILRVNEVDVSEVSHSKAVEALKEAGSIARLYVRRRRPILETVVEIKLFKGPKGLGFSIAGGVGNQHIPGDNSIYVTKIIDGGAAQKDGRLQVGDRLLMVNNYSLEEVTHEEAVAILKNTSEVVYLKVG

SEQ ID NO: 295 - protein, 119 aa, Drosophila melanogaster
SPQPRQPGSRYASTNVLAAVPPGTPRAVSTEDITREPRTITIQKGPQGLGFNIVGGEDGQGIYVSFILAGGPADLGSELKRGDQLLSVNNVNLTHATHEEAAQALKTSGGVVTLLAQYR

SEQ ID NO: 296 - protein, 120 aa, Homo sapiens
SPLKASPAPIIVNTDTLDTIPYVNGTEIEYEFEEITLERGNSGLGFSIAGGTDNPHIGDDPGIFITKIIPGGAAAEDGRLRVNDCILRVNEVDVSEVSHSKAVEALKEAGSIARLYVRRR

SEQ ID NO: 297 - protein, 75 aa, Drosophila melanogaster; identical to SEQ ID NO: 289

SEQ ID NO: 298 - protein, 81 aa, Homo sapiens
IKLFKGPKGLGFSIAGGVGNQHIPGDNSIYVTKIIDGGAAQKDGRLQVGDRLLMVNNYSLEEVTHEEAVAILKNTSEVVYL

SEQ ID NO: 299 - protein, 87 aa, Drosophila melanogaster
EIDLVKGGKGLGFSIAGGIGNQHIPGDNGIYVTKLTDGGRAQVDGRLSIGDKLIAVRTNGSEKNLENVTHELAVATLKSITDKVTLI

SEQ ID NO: 300 - protein, 77 aa, Homo sapiens
KVVLHKGSTGLGFNIVGGEDGEGIFVSFILAGGPADLSGELQRGDQILSVNGIDLRGASHEQAAAALKGAGQTVTII

SEQ ID NO: 301 - protein, 81 aa, Drosophila melanogaster
  MISC_FEATURE 47..63: Xaa is uncertain
IQLERGNSGLGFSIAGGTDNPHIGTDTSIYITKLISGGAAAADGRLXXXXXXXXXXXXXXXXXPHASAVDALKKAGNVVKL

SEQ ID NO: 302 - protein, 75 aa, Homo sapiens
VVLHKGSTGLGFNIVGGEDGEGIFVSFILAGGPADLSGELQRGDQILSVNGIDLRGASHEQAAAALKGAGQTVTI

SEQ ID NO: 303 - protein, 870 aa, Homo sapiens
MFFACYCALRTNVKKYRYQDEDAPHDHSLPRLTHEVRGPELVHVSEKNLSQIENVHGYVLQSHISPLKASPAPIIVNTDTLDTIPYVNGTEIEYEFEEITLERGNSGLGFSIAGGTDNPHIGDDPGIFITKIIPGGAAAEDGRLRVNDCILRVNEVDVSEVSHSKAVEALKEAGSIARLYVRRRRPILETVVEIKLFKGPKGLGFSIAGGVGNQHIPGDNSIYVTKIIDGGAAQKDGRLQVGDRLLMVNNYSLEEVTHEEAVAILKNTSEVVYLKVGNPTTIYMTDPYGPPDITHSYSPPMENHLLSGNNGTLEYKTSLPPISPGRYSPIPKHMLVDDDYTRPPEPVYSTVNKLCDKPASPRHYSPVECDKSFLLSAPYSHYHLGLLPDSEMTSHSQHSTATRQPSMTLQRAVSLEGEPRKVVLHKGSTGLGFNIVGGEDGEGIFVSFILAGGPADLSGELQRGDQILSVNGIDLRGASHEQAAAALKGAGQTVTIIAQYQPEDYARFEAKIHDLREQMMNHSMSSGSGSLRTNQKRSLYVRAMFDYDKSKDSGLPSQGLSFKYGDILHVINASDDEWWQARRVMLEGDSEEMGVIPSKRRVERKERARLKTVKFNAKPGVIDSKGSFNDKRKKSFIFSRKFPFYKNKEQSEQETSDPERGQEDLILSYEPVTRQEINYTRPVIILGPMKDRINDDLISEFPDKFGSCVPHTTRPKRDYEVDGRDYHFVISREQMEKDIQEHKFIEAGQYNDNLYGTSVQSVRFVAERGKHCILDVSGNAIKRLQVAQLYPIAIFIKPRSLESLMEMNKRLTEEQAKKTYDRAIKLEQEFGEYFTAIVQGDTLEDIYNQCKLVIEEQSGPFIWIPSKEKL

SEQ ID NO: 304 - protein, 767 aa, Homo sapiens
MSQRPRAPRSALWLLAPPLLRWAPPLLTVLHSDLFQALLDILDYYEASLSESQKYRYQDEDTPPLEHSPAHLPNQANSPPVIVNTDTLEAPGYELQVNGTEGEMEYEEITLERGNSGLGFSIAGGTDNPHIGDDPSIFITKIIPGGAAAQDGRLRVNDSILFVNEVDVREVTHSAAVEALKEAGSIVRLYVMRRKPPAEKVMEIKLIKGPKGLGFSIAGGVGNQHIPGDNSIYVTKIIEGGAAHKDGRLQIGDKILAVNSVGLEDVMHEDAVAALKNTYDVVYLKVAKPSNAYLSDSYAPPDITTSYSQHLDNEISHSSYLGTDYPTAMTPTSPRRYSPVAKDLLGEEDIPREPRRIVIHRGSTGLGFNIVGGEDGEGIFISFILAGGPADLSGELRKGDQILSVNGVDLRNASHEQAAIALKNAGQTVTIIAQYKPEEYSRFEAKIHDLREQLMNSSLGSGTASLRSNPKRGFYIRALFDYDKTKDCGFLSQALSFRFGDVLHVIDASDEEWWQARRVHSDSETDDIGFIPSKRRVERREWSRLKAKDWGSSSGSQGREDSVLSYETVTQMEVHYARPIIILGPTKDRANDDLLSEFPDKFGSCVPHTTRPKREYEIDGRDYHFVSSREKMEKDIQAHKFIEAGQYNSHLYGTSVQSVREVAEQGKHCILDVSANAVRRLQAAHLHPIAIFIRPRSLENVLEINKRITEEQARKAFDRATKLEQEFTECFSAIVEGDSFEEIYHKVKRVIEDLSGPYIWVPARERL

SEQ ID NO: 305 - protein, 817 aa, Homo sapiens
MHKHQHCCKCPECYEVTRLAALRRLEPPGYGDWQVPDPYGPGGGNGASAGYGGYSSQTLPSQAGATPTPRTKAKLIPTGRDVGPVPLKPVPGKSTPKLNGSGPSWWPECTCTNRDWYEQVNGSDGMFKYEEIVLERGNSGLGFSIAGGIDNPHVPDDPGIFITKIIPGGAAAMDGRLGVNDCVLRVNEVEVSEVVHSRAVEALKEAGPVVRLVVRRRQPPPETIMEVNLLKGPKGLGFSIAGGIGNQHIPGDNSIYITKIIEGGAAQKDGRLQIGDRLLAVNNTNLQDVRHEEAVASLKNTSDMVYLKVAKPGSLHLNDMYAPPDYASTFTALADNHISHNSSLGYLGAVESKVSYPAPPQVPPTRYSPIPRHMLAEEDFTREPRKIILHKGSTGLGFNIVGGEDGEGIFVSFILAGGPADLSGELRRGDRILSVNGVNLRNATHEQAAAALKRAGQSVTIVAQYRPEEYSRFESKIHDLREQMMNSSMSSGSGSLRTSEKRSLYVRALFDYDRTRDSCLPSQGLSFSYGDILHVINASDDEWWQARLVTPHGESEQIGVIPSKKRVEKKERARLKTVKFHARTGMIESNRDFPGLSDDYYGAKNLKGQEDAILSYEPVTRQEIHYARPVIILGPMKDRVNDDLISEFPHKFGSCVPHTTRPRRDNEVDGQDYHFVVSREQMEKDIQDNKFIEAGQFNDNLYGTSIQSVRAVAERGKHCILDVSGNAIKRLQQAQLYPIAIFIKPKSIEALMEMNRRQTYEQANKIYDKAMKLEQEFGEYFTAIVQGDSLEEIYNKIKQIIEDQSGHYIWVPSPEKL

SEQ ID NO: 306 - protein, 674 aa, Homo sapiens
  MISC_FEATURE (562)..(562): Xaa is uncertain
MRATHGSNSLPSSARLGSSSNLQFKAERIKIPSTPRYPRSVVGSERGSVSHSECSTPPQSPLNIDTLSSCSQSQTSASTLPRIAVNPASLGERRKDRPYVEEPRHVKVQKGSEPLGISIVSGEKGGIYVSKVTVGSIAHQAGLEYGDQLLEFNGINLRSATEQQARLIIGQQCDTITILAQYNPHVHQLSSHSRSSSHLDPAGTHSTLQGSGTTTPEHPSVIDPLMEQDEGPSTPPAKQSSSRIAGDANKKTLEPRVVFIKKSQLELGVHLCGGNLHGVFVAEVEDDSPAKGPDGLVPGDLILEYGSLDVRNKTVEEVYVEMLKPRDGVRLKVQYRPEEFTKAKGLPGDSFYIRALYDRLADVEQELSFKKDDILYVDDTLPQGTFGSWMAWQLDENAQKIQRGQIPSKYVMDQEFSRRLSMSEVKDDNSATKTLSAAARRSFFRRKHKHKRSGSKDGKDLLALDAFSSDSIPLFEDSVSLAYQRVQKVDCTALRPVLILGPLLDVVKEMLVNEAPGKFCRCPLEVMKASQQAIERGVKDCLFVDYKRRSGHFDVTTVASIXEITEKNRHCLLDIAPHAIERLHHMHIYPIVIFIHYKSAKHIKEQRDPIYLRDKVTQRHSKEQFEAAQKLEQEYSRYFTGVIQGGALSSICTQILAMVNQEQNKVLWIPACPL
